United States Patent Application Publication US 2026/0191920 A1 - sequence listing, part 21

SEQ ID NO: 91670 - protein, 253 aa, Corynebacterium jeikeium
  REGION 1..253: note = tr|Q4JT61|Q4JT61_CORJK 2,3-dihydro-2,3-dihydroxybenzoate dehydrogenase; OS = Corynebacterium jeikeium (strain K411) OX=306537; GN = entA PE=4 SV=1
MIVTGAAGGIGRECVRLLRQNDHTVIGWDLPEVDITSSNPTDPRSVESHLSKALAAHGHIDALIHCAGTLIPDSALTGPTAVDTVDTVSGIGTDPDETGAWENNFAVNVTGLARTCSAIAQHMVDRGTGAIVAVTSNAAAQPRARMASYGASKAAATAWLKTLALECAPHGVRCNSVSPGSTDTAMLRTSWHGEDRAAQTLAGVPEDYRLGIPLQRIAQPEDIAAACLFLISPAACHITMHDLRVDGGATLDA

SEQ ID NO: 91671 - protein, 280 aa, Corynebacterium jeikeium
  REGION 1..280: note = tr|A0A2X4TAB5|A0A2X4TAB5_CORJE 2,3-dihydro-2,3-dihydroxybenzoate dehydrogenase; OS = Corynebacterium jeikeium OX=38289 GN=entA PE=4 SV=1
MDFNIPPHLATRQPTESPPEQAQLQQSVIVTGAAGGIGRECVRLLRQNDHTVIGWDLPEVDITSSNPTDPRSVESHLSKALAAHGHIDALIHCAGTLIPDSALTGPTAVDTVDTVSGIGTDPDETGAWENNFAVNVTGLARTCSAIAQHMVDRGTGAIVAVTSNAAAQPRARMASYGASKAAATAWLKTLALECAPHGVRCNSVSPGSTDTAMLRTSWHGEDRAAQTLAGVPEDYRLGIPLQRIAQPEDIAAACLFLISPAACHITMHDLRVDGGATLDA

SEQ ID NO: 91672 - protein, 275 aa, Corynebacterium kroppenstedtii
  REGION 1..275: note = tr|C4LL34|C4LL34_CORK4 2,3-dihydro-2,3-dihydroxybenzoate dehydrogenase; OS = Corynebacterium kroppenstedtii (strain DSM 44385 / JCM 11950 / CIP 105744 / CCUG 35717) OX= 645127 GN=ckrop_1819; PE = 4 SV=1
MSETFPRHCVVTGALGGIGAAVVTAAKNAGYRVTAVDQAPHGETAVDQAPHGETAGADGDVAGVGNKTADLPVDYALDVTDAEAARTTSDRIEADRGPIDVLIHTAGILRADAALDGDTDAMRASFEVNMFGAAHVCAPVAQRMCERKRGAIVIVSSNAGTTPRAGMGSYGASKAAITAWARNLGLECAPHGVRVNIVSPGSTDTPMLRGMWPAGEDRSADVIAGTPDQYRLGIPLQRLAQPEDIAGACLYLVSDNARHIVMHDLRVDGGATLDS

SEQ ID NO: 91673 - protein, 264 aa, unidentified
  source 1..264: note = Corynebacterium lowii
  REGION 1..264: note = tr|A0A0Q1ADQ4|A0A0Q1ADQ4_9CORY 2,3-dihydro-2,3-dihydroxybenzoate dehydrogenase; OS = Corynebacterium lowii OX=1544413 GN=dhbA PE=4 SV=1
MPSDLIVVTGAAGGIGEAIARLSARRPHTTLILTDREESALERVAEEVAAHSGEGTQVHARPCDLAREEEVEALIEQAATLGTPRYLLHAAGVFTDRPVAQTSTEEFTRMMGVNAYGTFFLLRAMARAMMERPTEGDRGIVVVASNAVGVPRVGMGAYGASKAAASALTRSLGLELAEHGVRCNVVCPGSTDTAMQRDFWGADPEAGKRRSLHGDLVTHRLGIPLGRIATPEDVAHTVDFLASERARHVTLQEFFVDGGASLHA

SEQ ID NO: 91674 - protein, 242 aa, Corynebacterium matruchotii
  REGION 1..242: note = tr|E0DCH5|E0DCH5_9CORY 2,3-dihydroxybenzoate-2,3-dehydrogenase OS=Corynebacterium matruchotii ATCC 14266 OX=553207 GN=HMPREF0299_6024 PE=4; SV = 1
MTNRHITMKNPPQHIIITGATGGIGAACTKLFRSHDHVVSTWDIPEVDVTDIHQVTEQFRQDVDKHGPVAALVHCAGVMEPDSATNPQNTRNMTINYGGVVNVCSVVAKHMQEQRAGAIVVVSSNAATTPRVGMASYGASKAAVTAWVRTLALESAQFGVRCNVVSPGSTDTPMLRGMWQPDTDQSEQVIAGTPQEYRLGIPLQKLAQPADIAEACAFLISPAAGHITMHDLRVDGGATLDS

SEQ ID NO: 91675 - protein, 242 aa, Corynebacterium matruchotii
  REGION 1..242: note = tr|A0A448TGL4|A0A448TGL4_9CORY 2,3-dihydro-2,3-dihydroxybenzoate dehydrogenase; OS = Corynebacterium matruchotii OX=43768 GN=entA PE=4 SV=1
MTNRHITMKNPPQHIIITGATGGIGAACTKLFRSHDHVVSTWDIPEVDVTDIHQVTEQFRQDVDKHGPVAALVHCAGVMEPDSATNPQNTRNMTINYGGVVNVCSVVAKHMQEQRAGAIVVVSSNAATTPRIGMASYGASKAAVTAWVRTLALESAQFGVRCNVVSPGSTDTPMLRGMWQPDTDQSEQVIAGTPQEYRLGIPLQKLAQPADIAEACAFLISPAAGHITMHDLRVDGGATLDS

SEQ ID NO: 91676 - protein, 210 aa, unidentified
  source 1..210: note = Corynebacterium oculi
  REGION 1..210: note = tr|A0A0Q0UDT3|A0A0Q0UDT3_9CORY 2,3-dihydro-2,3-dihydroxybenzoate dehydrogenase; OS = Corynebacterium oculi OX=1544416 GN=entA_2 PE=4 SV=1
MPHAVITGASRGVGRDVAALLLRAGWTLSAQYHSQPDHTLDAQWWQADFRQPLPGQLPLPERIDALIHCAGICPIGTTEALPRAAWEESLAVNLHAPVELTARALPALRAAQGHVIYVNSGAGIHSKPQWSAYSAAKHAARAWCDALRAEEPEIRVTSIYPGRIATDMQRGIVAALGEQWRPESYLETTEVAQAIVAALGGHTTDIQVRP

SEQ ID NO: 91677 - protein, 249 aa, unidentified
  source 1..249: note = Corynebacterium pelargi
  REGION 1..249: note = tr|A0A410WAX9|A0A410WAX9_9CORY 2,3-dihydro-2,3-dihydroxybenzoate dehydrogenase; OS = Corynebacterium pelargi OX=1471400 GN=entA PE=4 SV=1
MALKHSEDLEHRGHCLVTGAKGGIGQATCDVLLEHGYSVSRWDLPEVDVSDPESIDHHLQALPAPVDYLIHTAGVLRPDSALQPDWDAIRQSVAINLEGVIATCSPIAQQMAARKRGAIVVVTSNAAAVPRSGMAAYGASKAAAKSWVHTLGLELAPYGVRCNTVSPGSTDTPMLRGMWHEPSDTETQLKQRHQEVIAGNPEAYRLGIPLQRVATPEDIAQACLWLISPQSRHITMHDLRVDGGATLDA

SEQ ID NO: 91678 - protein, 274 aa, unidentified
  source 1..274: note = Corynebacterium provencense
  REGION 1..274: note = tr|A0A2Z3YSY3|A0A2Z3YSY3_9CORY 2,3-dihydro-2,3-dihydroxybenzoate dehydrogenase; OS = Corynebacterium provencense OX=1737425 GN=entA PE=4 SV=1
MGAAVARLLLTRPDRPSVLVLSDRDPAALAAVVESLAGTTSPGPEEHDTVVTGVVCDVSRESSVKDLFCEAGRRGPLTRVIHAAGVLGSGATVTDTPVDDFDRVFAVNARGTFLVVREAAGTMLAQDGATDRTAPGSDPADRADRADRAVTVIASNAAGVPRHGMGVYAASKAAASSLTRSLGLEVAGAGIRCNVVNPGSTDTAMQRDYWGDDPGAGRRRVLAGDLSTARLGIPLGRIASPADVAEVVVFLSSPQARHVILQEIYVDGGATLHA

SEQ ID NO: 91679 - protein, 249 aa, unidentified
  source 1..249: note = Corynebacterium pseudopelargi
  REGION 1..249: note = tr|A0A3G6IWJ7|A0A3G6IWJ7_9CORY 2,3-dihydro-2,3-dihydroxybenzoate dehydrogenase; OS = Corynebacterium pseudopelargi OX=2080757 GN=entA PE=4; SV = 1
MALKHSEDLEHRGHCLITGAKGGIGQATCDLLLEHGYSVSRWDLPEVDVSDPESIAHHLQALPAPVDYLIHTAGVLRPDSALQPDWDAIRQSVAINLEGVIATCSPIAQQMAARKRGAIVVVTSNAAAVPRSGMAAYGASKAAAKSWVHTLGLELAPYGVRCNTVSPGSTDTPMLRGMWHEPSDTETQLKQRHQEVIAGNPEAYRLGIPLQRVATPEDIAQACLWLISPQSRHITMHDLRVDGGATLDA

SEQ ID NO: 91680 - protein, 267 aa, Corynebacterium variabile
  REGION 1..267: note = tr|G0HGL3|G0HGL3_CORVD 2,3-dihydro-2,3-dihydroxybenzoate dehydrogenase; OS = Corynebacterium variabile (strain DSM 44702 / JCM 12073 / NCIMB 30131) OX=858619 GN=entA PE =4 SV=1
MSDVAVVTCAAGGMGTAVARLLLSRTDRPSTLILADRDPEALASAVGGLPAFADIRTVTCDVSDEDAVSDLFSAAAGAGRVTRVIHGAGVLGPGVSVAETEPTDFDRVFAVNACGTFLVTRAAARVMTAQGRSQEDAPSDRAITVIASNAAGVPRHGMGVYAASKAAASAVTRSLGLEVAADGIRCNVVNPGSTDTAMQRDYWGDDAAAGKARVLGGDLATARLGIPLGRIATADDVAEVVVFLSSPEARHVVLQEIYVDGGATLHA

SEQ ID NO: 91681 - protein, 254 aa, Corynebacterium variabile
  REGION 1..254: note = tr|A0A0X2NMF7|A0A0X2NMF7_9CORY Dehydrogenases with different specificities (Related to short-chain alcohol dehydrogenases) OS=Corynebacterium variabile OX=1727 GN=CV AR292_01253 PE=4 SV=1
MGTAVARLLLSRTDRPSTLILADRDPEALASAVGGLPAFADIRTVTCDVSDEDAVSDLFSAAAGAGRVTRVIHGAGVLGPGVSVAETEPTDFDRVFAVNARGTFLVTRAAARVMTAQGRSQEDAPSDRAITVIASNAAGVPRHGMGVYAASKAAASAVTRSLGLEVAADGIRCNVVNPGSTDTAMQRDYWGDDAAAGKARVLGGDLATARLGIPLGRIATADDVAEVVVFLSSPEARHVVLQEIYVDGGATLHA

SEQ ID NO: 91682 - protein, 250 aa, Cronobacter condimenti
  REGION 1..250: note = tr|K8AA41|K8AA41_9ENTR 2,3-dihydro-2,3-dihydroxybenzoate dehydrogenase [enterobactin] siderophore OS=Cronobacter condimenti 1330; OX = 1073999 GN=BN137_1967 PE=4 SV=1
MRLDFSDQNVWVTGAGKGIGYTTARAFVDAGANVTGFDLAFPGEDYPFACETLDVADAAAVASACQRRLGDHARLDVLVNAAGILRMGATDALSVADWQQTFAVNVGGAFNFFQQTMAQFRAQKGGAIVTVASDAAHTPRIGMSAYGASKAALKSLALTVGLELAAYGVRCNLVSPGSTDTDMQRTLWTSNDAEQQRIRGFAEQFKLGIPLGKIAQPQDVANTILFLASPLAGHITLQDMVIDGGSTLGA

SEQ ID NO: 91683 - protein, 250 aa, Cronobacter dublinensis
  REGION 1..250: note = tr|K8AJC5|K8AJC5_9ENTR 2,3-dihydro-2,3-dihydroxybenzoate dehydrogenase [enterobactin] siderophore OS=Cronobacter dublinensis 1210; OX = 1208656 GN=BN134_1403 PE=4 SV=1
MTLDFSGQTVWVTGAGKGIGYATARAFAQAGATVTGFDLAFPHADYPFACETLDVADAAGVAAVCQRLLRDDARLDVLVNAAGILRMGATDALALDDWQQTLAVNVGGAFNFFQQTMATFRAQKRGAIVTVASDAAHTPRIGMSAYGASKAALKSLALTVGLELASCGVRCNLVSPGSTDTDMQRTLWHSDDAEQQRIRGFAEQFKLGIPLGKIAQPQEVANTILFLASDLASHITLQDLVIDGGSTLGA

SEQ ID NO: 91684 - protein, 217 aa, Cronobacter dublinensis
  REGION 1..217: note = tr|K8BB30|K8BB30_9ENTR 2,3-dihydro-2,3-dihydroxybenzoate dehydrogenase [enterobactin] siderophore OS=Cronobacter dublinensis 582; OX = 1208661 GN=BN133_1939 PE=4 SV=1
MTGFDLAFPHADYPFACETLDVADAAGVAAVCQRLLRDDARLDVLVNAAGILRMGATDALALDDWQQTFAVNVGGAFNFFQQTMATFRAQKRGAIVTVASDAAHTPRIGMSAYGASKAALRSLALTVGLELASCGVRSNLVSPGSTDTDMQRTLWHSDDAEQQRIRGFAEQFKLGIPLGKIAQPQEVANTILFLASDLASHITLQDLVIDGGSTLGA

SEQ ID NO: 91685 - protein, 250 aa, Cronobacter dublinensis; identical to SEQ ID NO: 91683
  REGION 1..250: note = tr|A0A0K2P566|A0A0K2P566_9ENTR 2,3-dihydroxybenzoate-2,3-dehydrogenase OS=Cronobacter dublinensis subsp. dublinensis LMG 23823 OX=1159554; GN = AFK67_14875 PE=4 SV=1

SEQ ID NO: 91686 - protein, 108 aa, Cronobacter sakazakii
  REGION 1..108: note = tr|K8CT07|K8CT07_CROSK 2,3-dihydro-2,3-dihydroxybenzoate dehydrogenase [enterobactin] siderophore OS=Cronobacter sakazakii 696; OX = 1208664 GN=BN128_1978 PE=4 SV=1
MSAYGASKAALKSLALTVGLELASFGVRANLVSPGSTDTDMQRTLWKSDDAEQQRIRGFAEQFKLGIPLGKIAKPQEVANTILFLASELASHITLQDIVIDGGSTLGA

SEQ ID NO: 91687 - protein, 72 aa, Cronobacter sakazakii
  REGION 1..72: note = tr|K8CE17|K8CE17_CROSK 2,3-dihydro-2,3-dihydroxybenzoate dehydrogenase [enterobactin] siderophore OS=Cronobacter sakazakii 701; OX = 1208663 GN=BN129_2189 PE=4 SV=1
MTLDFQGKNVWVTGAGKGIGYTTALAFAAAGANVTGFDLVFPLADYPFACETLDVAAFASGCSAMTRALMCW

SEQ ID NO: 91688 - protein, 250 aa, Cronobacter sakazakii
  REGION 1..250: note = tr|A0A5D1BNX9|A0A5D1BNX9_CROSK 2,3-dihydro-2,3-dihydroxybenzoate dehydrogenase; OS = Cronobacter sakazakii OX=28141 GN=dhbA PE=4 SV=1
MTLDFQGKNVWVTGAGKGIGYTTALAFAGAGANVTGFDLAFPLADYPFACETLDVADAAAVAGVCERLLGNNPRLDVLVNAAGILRMGATDELAPDDWQQTFAVNVGGAFNFFQQTMAQFRTQKGGAIVTVASDAAHTPRIGMSAYGASKAALKSLALTVGLELASFGVRANLVSPGSTDTDMQRTLWKSDDAEQQRIRGFAEQFKLGIPLGKIAQPQEVANTILFLASDLASHITLQDIVIDGGSTLGA

SEQ ID NO: 91689 - protein, 282 aa, Cronobacter turicensis
  REGION 1..282: note = tr|C9XXI2|C9XXI2_CROTZ 2,3-dihydro-2,3-dihydroxybenzoate dehydrogenase; OS = Cronobacter turicensis (strain DSM 18703 / LMG 23827 / z3032) OX=693216 GN=entA PE=4 SV=1
MAQSTWRYRFRDAREKPDHRCLVGAAEPGAAGMTLDFRGKNVWVTGAGKGIGYTTALAFVAAGAKVTGFDLAFPLADYPFACETLDVADAAAVADVCQRLLTNSARLDVLVNAAGILRMGATDELSPDDWQQTFAVNVGGAFNFFQQTMAQFRAQKGGAIVTVASDAAHTPRLGMSAYGASKAALKSLALTVGLELASSGVRANLVSPGSTDTDMQRTLWKSDDAEQQRIRGFAGQFKLGIPLGKIAQPQDVANTILFLASDLASHITLQDIVIDGGSTLGA

SEQ ID NO: 91690 - protein, 250 aa, Cronobacter universalis
  REGION 1..250: note = tr|A0A376ESL1|A0A376ESL1_9ENTR 2,3-dihydro-2,3-dihydroxybenzoate dehydrogenase; OS = Cronobacter universalis NCTC 9529 OX=1074000 GN=entA; PE = 4 SV=1
MTLDFRGKNVWVTGAGKGIGYTTALAFAAAGAKVTGFDLAFPLADYPFACETLDVADAAAVAAVCQRLPGNDARLDVLVNAAGILRMGATDELTADDWQQTFAVNVGGAFNFFQQTMAQFRAQKGGAIVTVASDAAHTPRIGMSAYGASKAALKSLALTVGLELAPYGVRANLVSPGSTDTDMQRTLWKSDDAEQQRIRGFAEQFKLGIPLGKIAQPQDVANTILFLASDLASHITLQDIVIDGGSTLGA

SEQ ID NO: 91691 - protein, 233 aa, Cryobacterium sp.
  REGION 1..233: note = tr|A0A4V2DZ14|A0A4V2DZ14_9MICO 2,3-dihydro-2,3-dihydroxybenzoate dehydrogenase; OS = Cryobacterium sp. SO1 OX=1897061 GN=entA PE=4 SV=1
MLELRGSTILVVGATGGLGREIARQLSDAGATLVLSARDPAVLAALGLPGAIVAADLTDPAAVRRLVDVAATVTGRLDGIVVAAGVVAFGPAAGLTADTIARLFAVNTTAPMLLLQAAHAPLAASAAAGRSPFLLTLSGVVSESPTANLAAYSASKAALAAFGSAAGRELRRVGIRVIDARPGHTETALSRHPISGTAPRLPVGLDPVAVCARIVRGIVDGERDLPSTAFAPV

SEQ ID NO: 91692 - protein, 251 aa, Deinococcus maricopensis
  REGION 1..251: note = tr|E8U3H8|E8U3H8_DEIML 2,3-dihydro-2,3-dihydroxybenzoate dehydrogenase; OS = Deinococcus maricopensis (strain DSM 21211 / LMG 22137 / NRRL B-23946 / LB-34) OX=709986 GN =Deima_0185 PE=4 SV=1
MTGPHAAGPVALVTGAAGGIGAAIVAHLGQQAYRVVATDLHAPAAPHAARAAALDVTDARRVEELVDEIERTLGPIDALVNAAGILRPGALTTYSDEDWARTFAVNTTGPFLTGRAVGRRMAPRGRGAIVTVTSNAAHVARAGMGAYAASKAATAHLTRCLGLELAPHGVRCNTVSPGSTDTRMGRQLWTEAHGADAVIRGSLDAYRPGIPLGRIAQPQDVAGVVAFLLSDAARHVTLQDVVVDGGATLGA

SEQ ID NO: 91693 - protein, 252 aa, unidentified
  source 1..252: note = Dickeya aquatica
  REGION 1..252: note = tr|A0A375A8B2|A0A375A8B2_9GAMM 2,3-dihydro-2,3-dihydroxybenzoate dehydrogenase OS=Dickeya aquatica OX=1401087 GN=cbsA PE=4 SV=1
MSIRADFSGKQVWITGAGRGIGYDIACRFLEAGADVTGFDLAFPGDTPAFRAIALDIGDAAAVADACATLLAHTPRLDVLVNGAGILRMGATEALSQADWQDCLRVNAGEPFTCFRRLIPQFQQQRAGAIITIGSNAAHVPRVGMAAYCASKAALRSLCLTAGLELAAYGVRCNLVSPGSTDTPMQRSLWHSADAEQHTINGFPNQFKLGIPLGKIAQPREITDTVLFLASESASHITLQDIVIDGGATLGA

SEQ ID NO: 91694 - protein, 252 aa, Dickeya dadantii
  REGION 1..252: note = tr|E0SLE6|E0SLE6_DICD3 2,3-dihydro-2,3-dihydroxybenzoate dehydrogenase, chrysobactin biosynthesis OS=Dickeya dadantii (strain 3937) OX=198628 GN=cbsA PE=4 SV=1
MSVTLDFSGKQVWVTGAGRGIGYDIACRFSEAGATVTGFDRAFSDGEPPFRAVELDIGDHAAVADVCATLLAKTPRLDVLVNGAGILRMGQTETLSQQDWLDCLTVNAGGAFHLFQALIPQFQQQRSGAIVSIGSNAAHVPRVGMAAYCASKAALRSLCLTVGLELAPYGVRCNMVSPGSTDTPMQRSLWHSPASEQHTIAGFPEQFKLGIPLGKIARPREITDAVLFLASDLASHVTLQDMVIDGGATLGA

SEQ ID NO: 91695 - protein, 251 aa, Dickeya dianthicola
  REGION 1..251: note = tr|A0A3A4CF25|A0A3A4CF25_9GAMM 2,3-dihydro-2,3-dihydroxybenzoate dehydrogenase OS=Dickeya dianthicola OX=204039 GN=entA PE=4 SV=1
MSVTLDFSGKQVWVTGAGRGIGYDIACRFTEAGATVTGFDRAFSVEPPFRAIELDIGAHAAVADVCATLLAQTPRLDVLVNGAGILRIGQTEALSQQDWQDCLTVNAGGAFHLFQALIPQFQRQRSGAIVSIGSNAAHVPRAGMAAYCASKAALRSLCLTVGLELAPYGVRCNMVSPGSTDTPMQRSLWHSPASEQHTIAGFPEQFKLGIPLGKIARPRDITDAVLFLASDLASHVTLQDMVIDGGATLGA

SEQ ID NO: 91696 - protein, 252 aa, unidentified
  source 1..252: note = Dickeya solani
  REGION 1..252: note = tr|A0A2K8VW20|A0A2K8VW20_9GAMM 2,3-dihydro-2,3-dihydroxybenzoate dehydrogenase OS=Dickeya solani RNS 08.23.3.1.A OX=1240086 GN=D083_1107 PE=4 SV=1
MSVTLDFSGKQVWVTGAGRGIGYDIACRFTEAGATVTGFDRAFSDDEPPFRAVELDIGDHAAVADVCATLLAQTPRLDVLVNGAGILRMGQTETLSQQDWLDCLTVNAGGAFHLFQALIPQFQRQRSGAIVSIGSNAAHVPRVGMAAYCASKAALRSLCLTVGLELAPYGVRCNMVSPGSTDTPMQRSLWHSPAAEQHTIAGFPAQFKLGIPLGKIARPREITDAVLFLASDLASHVTLQDMVIDGGATLGA

SEQ ID NO: 91697 - protein, 252 aa, Dickeya sp.
  REGION 1..252: note = tr|A0A454USK9|A0A454USK9_9GAMM 2,3-dihydro-2,3-dihydroxybenzoate dehydrogenase OS=Dickeya sp. FVG10-MFV-A16 OX=2487135 GN=dhbA PE=4 SV=1
MSVTLDFSGKQVWVTGAGRGIGYDIACRFADAGATVTGFDRAFSTDDLPFRAVELDISNAAAVADVCTTLLAQTPHLDVLVNGAGILRMGQTEALSQQDWQDCLNVNAGGAFHLFQALIPQFQQQRSGAIVSIGSNAAHVPRVGMAAYCASKAALRSLCLTVGLELAPYGVRCNLVSPGSTDTPMQRSLWHSPASEQHTIAGFPEQFKLGIPLGKIARPREITDAVLFLASDLASHVTLQDMVIDGGATLGA

SEQ ID NO: 91698 - protein, 252 aa, Dickeya sp.; identical to SEQ ID NO: 91697
  REGION 1..252: note = tr|A0A3N0GAC2|A0A3N0GAC2_9GAMM 2,3-dihydro-2,3-dihydroxybenzoate dehydrogenase OS=Dickeya sp. FVG1-MFV-O17 OX=2487136 GN=dhbA PE=4 SV=1

SEQ ID NO: 91699 - protein, 252 aa, Dickeya sp.
  REGION 1..252: note = tr|A0A5B8HJD5|A0A5B8HJD5_9GAMM 2,3-dihydro-2,3-dihydroxybenzoate dehydrogenase OS=Dickeya sp. NCPPB 569 OX=568768 GN=dhbA PE=4 SV=1
MSVTLDFSGKQVWVTGAGRGIGYDIACRFTEAGATVTGFDRVFSADEQPFRAIELDISNAAVVAEVCATQLAHTPHLDVLINGAGILRMGQTEALSQQDWQDCLNVNAGGAFHFFQALIPQFQQQRRGAIVSIGSNAAHVPRVGMAAYCASKAALRSLCMTVGLELAPYGVRCNLVSPGSTDTPMQRSLWHSPASEQQTIAGFPEQFKLGIPLGKIAHPRDITDAVLFLASDLAGHVTLQDMVIDGGATLGA

SEQ ID NO: 91700 - protein, 252 aa, Dickeya zeae
  REGION 1..252: note = tr|A0A0A8FFD7|A0A0A8FFD7_9GAMM 2,3-dihydroxybenzoate-2,3-dehydrogenase OS=Dickeya zeae EC1 OX=1427366 GN=W909_13805 PE=4 SV=1
MSVALDFSGKQVWVTGAGRGIGYDIACRFTEAGATVTGFDRAFSSDSLPFHAIELDVSDAAAVAATCARQLAQTPHLDVLINGAGILRMGHTETLSQQDWQDCLNVNAGGAFHLFQAVIPQFQRQRGGAIVSIGSNAAHVPRVGMAAYCASKAALRSLCLTVGLELAPYGVRCNLVSPGSTDTPMQRSLWHAPDAEQHTIAGFPQQFKLGIPLGKIARPRDITDTVLFLASDLAGHVTLQDVVIDGGATLGA

SEQ ID NO: 91701 - protein, 262 aa, Dyella sp.
  REGION 1..262: note = tr|A0A410UFJ9|A0A410UFJ9_9GAMM 2,3-dihydro-2,3-dihydroxybenzoate dehydrogenase OS=Dyella sp. M7H15-1 OX=2501295 GN=EO087_02575 PE=3 SV=1
MVIPATSRFSSKTIVVTGAAQGIGAAVVRMLVAEGAFVHALDVNQEPLQQLCAAMNEHTECCEAIPIDISRREAVETAVAQIERRRPIDGLVNGAGVLIPAPFEAITPEAWSGMFDVNVHGTFFMSHSVARRMIERRKGAIVTIASNAATTPRMNLAAYCASKAAAAMLTKCMGLELGRHGIRCNVVSPGSTNTAMLTAMAGEGAERDRMLIDGDQHAYRLGIPLRKIAEPEDIARAVIFLLSDEANHITLHDLVVDGGATL

SEQ ID NO: 91702 - protein, 260 aa, Ectocarpus siliculosus
  REGION 1..260: note = tr|D8LFB6|D8LFB6_ECTSI 2,3-dihydro-2,3-dihydroxybenzoate dehydrogenase; OS = Ectocarpus siliculosus OX=2880 GN=mxcC PE=4 SV=1
MSTANNVLSLAGKLCLVTGASSGLGMHFARTLANHGAKVAVAARRVDRLDALVEELTLGGAAGVCAVRMDVRDETSIKAGVKQVEQILGPIDVLVNNAGVAVQSPSLKQTRREWEKVLDTNLVGPFLVAQAVARSMVRDKRSGSIINISSVSSMVPSSGLAAYCSSKAGLTHLTKVLALEWARHGIRVNAVCPGYFKTEMNSDFFDTPNGDRIVKAIPMRRLGDPSELDGLLLMLASERASSYMTGSVLTLDGGIMLSHL

SEQ ID NO: 91703 - protein, 276 aa, unidentified
  source 1..276: note = Empedobacter haloabium
  REGION 1..276: note = tr|A0A5C7BWR4|A0A5C7BWR4_9FLAO 2,3-dihydro-2,3-dihydroxybenzoate dehydrogenase; OS = Empedobacter haloabium OX=592317 GN=dhbA PE=4 SV=1
MLADQKNLGTASAERPQAPPALQFEGRQVWVTGAGRGIGHQIALAFRQLGARVVGIDRAFDREEAGPAGKRYPFKTVCMDVTDRARIAVVCQQLLTEMPRIDVLVNAAGVLRLGTLDSTTVEDWQASFDINVSGVFYLLRELMPQFRKQGAGSIVNVASNAARVPRMNMLAYCASKSALVGMSHCAALELAQFGVRCNVVSPGSTDTPMLRSMLPDEQGMRRTIEGLPEQFKLGIPLRKIATAREVANTVLFLASDLASHITMQEVVVDGGATLAA

SEQ ID NO: 91704 - protein, 296 aa, Enhygromyxa salina
  REGION 1..296: note = tr|A0A2S9XDH8|A0A2S9XDH8_9DELT 2,3-dihydro-2,3-dihydroxybenzoate dehydrogenase; OS = Enhygromyxa salina OX=215803 GN=entA PE=4 SV=1
MSGKTVLITGGNSGIGSFTAVGLARMGARVVFTSRNPRKGDVARAELREAAETKSIDYMALDLASFTSIAAFADQYLAKYDRLDVLILNAGVILDARTETKEGFETTFGVNHLGHFYLTQLLRERLEASAPARVVVVASDAYRGAREGLDFDDLMATRDYKPLRAYAHSKLANILFTNELARQLEGKGVTANSLHPGVVRTGLGRDGDVRSLLGRVALSVMRPFLISPERGARTSIYLASSPEVEGESGGYYVSCRPAKRIAPATDEGAARRLWQVSEELVAEGKATAKAKARRPS

SEQ ID NO: 91705 - protein, 252 aa, unidentified
  source 1..252: note = Enterobacter agglomerans
  REGION 1..252: note = tr|A0A4V3R8H7|A0A4V3R8H7_ENTAG 2,3-dihydro-2,3-dihydroxybenzoate dehydrogenase; OS = Enterobacter agglomerans OX=549 GN=dhbA PE=4 SV=1
MSHTFDFSGKIVWVTGAGQGIGYHTALAFHQAGAQVEAFDQRFKGHDYPFPCHTMDVADPAQVKTICQRVLAAQPRIDVLVNAAGILRIGATDELSFADWQACLNVNAGGAFNLFQQTLPRFREQRAGAIVTVASNSAHAPRIGMSAYGASKAALRSLCQTVGLEMAPYGVRCNIVSPGSTDTDMQRSLWHTPTGEQEMIAGFPDQFKLGIPLGKIAQPHEIAATVLFLASDLASHVTLQDIVVDGGATLGA

SEQ ID NO: 91706 - protein, 280 aa, Enterobacter asburiae
  REGION 1..280: note = tr|A0A376F7I1|A0A376F7I1_ENTAS Protein YxbG; OS = Enterobacter asburiae OX=61645 GN=yxbG PE=4 SV=1
MGLKNKTAVIFGGSGAIGSSAAHVLAREGADVYLAARDHARLEQVASRIRAAGGSASTFIFDVLDDSSQLPDLARIDVVVNATGFMHDQGKRLEALTLGEFRQGFDPFLAAYFNIAKAASPRMGGEHGGTIITVVAPAANMTMAGHLGHIVGCAGTEALTRALAAELGTHNIRVLCVRSHAIADAVQAGSYVGTIFASRAQAMGITVEQFLGGAAQSTLTHRLPTLAQVADTIKFLALRCGGRHHGNYRQYDRGRNLAPLSPAILPTIARISSRLTAPGR

SEQ ID NO: 91707 - protein, 251 aa, unidentified
  source 1..251: note = Enterobacter bugandensis
  REGION 1..251: note = tr|A0A431SPM6|A0A431SPM6_9ENTR 2,3-dihydro-2,3-dihydroxybenzoate dehydrogenase; OS = Enterobacter bugandensis OX=881260 GN=dhbA PE=4 SV=1
MAGFDFTGKTVWVTGAGKGIGYATALAFVEAGARVTGFDLAFPQDDYPFSTETLDVADAAQVGDVCGRLLGTLERLDVLVNAAGILRMGATDELSQEDWQQTFAVNVGGAFNLFQQTMGQFRRQQGGAIVTVASDAAHTPRIGMSAYGASKAALKSLALTVGLELAGSGVRCNLVSPGSTDTDMQRTLWKSDDAEQQRIRGFGEQFKLGIPLGKIARPREIAATVLFLASDAASHITLQDIVVDGGSTLGA

SEQ ID NO: 91708 - protein, 251 aa, Enterobacter cancerogenus
  REGION 1..251: note = tr|D2ZGJ7|D2ZGJ7_9ENTR 2,3-dihydroxybenzoate-2,3-dehydrogenase OS=Enterobacter cancerogenus ATCC 35316 OX=500639 GN=ENTCAN_07614 PE=4 SV=1
MAGFDFTGKTVWVTGAGKGIGYATAQAFAEAGAQVTGFDLAFTRTHYPFATETLDVADAAQVKAVCGRLLQSTARLDVLVNAAGILRMGATDQLSQEDWQQTFAVNVGGAFNLFQQTMDTFRRQQGGAIVTVASDAAHTPRIGMSAYGASKAALKSLALTVGLELAGSGVRCNLVSPGSTDTDMQRTLWTSDDAERQRIRGFGEQFKLGIPLGKIARPQEIASTVLFLASDAASHITLQDIVVDGGSTLGA

SEQ ID NO: 91709 - protein, 251 aa, Enterobacter cancerogenus
  REGION 1..251: note = tr|A0A484X0L0|A0A484X0L0_9ENTR 2,3-dihydro-2,3-dihydroxybenzoate dehydrogenase; OS = Enterobacter cancerogenus OX=69218 GN=entA PE=4 SV=1
MAGFDFTGKTVWVTGAGKGIGYATAQAFAEAGAQVTGFDLAFPLTHYPFATETLDVADAAQVKAVCGRLLQSTARLDVLVNAAGILRMGATDQLSQEDWQQTFAVNVGGAFNLFQQTMDTFRRQRGGAIVTVASDAAHTPRIGMSAYGASKAALKSLALTVGLELAGSGVRCNLVSPGSTDTDMQRTLWTSDDAERQRIRGFGEQFKLGIPLGKIARPQEIASTVLFLASDAASHITLQDIVVDGGSTLGA

SEQ ID NO: 91710 - protein, 251 aa, unidentified
  source 1..251: note = Enterobacter chengduensis
  REGION 1..251: note = tr|A0A0F4BPJ3|A0A0F4BPJ3_9ENTR 2,3-dihydroxybenzoate-2,3-dehydrogenase OS=Enterobacter chengduensis OX=2494701 GN=SG71_10605 PE=4 SV=1
MMGLDFTGKTVWVTGAGKGIGYATALAFAEAGAQVTGFDLAFPLGDYPFTTETLDVADAGQVQEVCGRVLASRERLDVLVNAAGILRMGATDQLSQADWQQTFAVNVGGAFNLFQQTMGQFRRQQGGAIVTVASDATHTPRIGMSAYGASKAALKSLALTVGLELAGSGVRCNLVSPGSTDTDMQRTLWKSDDAEQQRIRGFGEQFKLGIPLGKIARPQEIASTVLFLASDAASHITLQDIVVDGGSTLGA

SEQ ID NO: 91711 - protein, 251 aa, unidentified
  source 1..251: note = Enterobacter chuandaensis
  REGION 1..251: note = tr|A0A3A3ZFD6|A0A3A3ZFD6_9ENTR 2,3-dihydro-2,3-dihydroxybenzoate dehydrogenase; OS = Enterobacter chuandaensis OX=2497875 GN=dhbA PE=4 SV=1
MMGFDFTGKTVWVTGAGKGIGYASALAFVEAGAQVTGFDLAFPQNDYPFTTETLDVADAAQVGEVCGRALASLERLDVLVNAAGILRMGATDELSLEDWQQTFAVNVGGAFNLFQQTMGQFRRQQGGAIVTVASDAAHTPRIGMSAYGASKAALKSLALTVGLELAGSGVRCNLVSPGSTDTDMQRTLWKSDDAEQQRIRGFGEQFKLGIPLGKIARPQEIASTVLFLASDSASHITLQDIVVDGGSTLGA

SEQ ID NO: 91712 - protein, 251 aa, Enterobacter cloacae
  REGION 1..251: note = tr|A0A4P6XYX6|A0A4P6XYX6_9ENTR 2,3-dihydro-2,3-dihydroxybenzoate dehydrogenase; OS = Enterobacter cloacae complex sp. OX=2027919 GN=dhbA; PE = 4 SV=1
MAGFDFTGKTVWVTGAGKGIGYATALAFAEAGAQVTGFDLAFPQDDYPFATETLDVADAAQVHEVCGRALASLERLDVLVNAAGILRMGATDQLSQEDWQHTFAVNVGGAFNLFQQTMGQFRRQQGGAMVTVASDAAHAPRIGMSAYGASKAALKSLALTVGLELAGSGVRCNLVSPGSTDTDMQRTLWKSDDAEQQRIRGFGEQFKLGIPLGKIARPQEIAATVLFLASDAASHITLQDIVVDGGSTLGA

SEQ ID NO: 91713 - protein, 342 aa, Enterobacter cloacae
  REGION 1..342: note = tr|A0A5E0X9N9|A0A5E0X9N9_ENTCL 2,3-dihydro-2,3-dihydroxybenzoate dehydrogenase [enterobactin] siderophore OS=Enterobacter cloacae OX=550; GN = fabG_2 PE=4 SV=1
MQIDLTGKKALVTGASRGLGRAIALSLARAGADVVITYEKSVDKAQQVVDEINALGRHGEAIQADSASAQAIQDAVTQAARSLGGLDILVNNAGIARGGPLESMTLADIDALINVNIRGVVIAIQEALVHMSDGGRIINIGSCLANRVAQPGIAVYSMTKSALNSLTRGLARDLGPRGITVNLVHPGPTNSDMNPEDGEQADSQRQLIALGHYGQPEDVAAAVTFLASPAAGQISGTGLDVDGGLNALSQFSCKPLSPSRGLFEPPRRFAFCLLPALFFRSTVPHKKFGIYLIVLLFPYILCGRTVEVRMKIVWSKTAEKQFSKIDTRYQNRIKFRLEKMDD

SEQ ID NO: 91714 - protein, 251 aa, Enterobacter cloacae
  REGION 1..251: note = tr|V5AES2|V5AES2_ENTCL 2,3-dihydro-2,3-dihydroxybenzoate dehydrogenase; OS = Enterobacter cloacae S611 OX=1399146 GN=EDP2_4005 PE=4; SV = 1
MASLDFSGRSVWVSGAGKGIGYATALAFVGAGAKVTGFDLAFNGEHYPFACETLDIADAAQVAAVSERLLANNAPLDVLVNAAGILHMGATDALSDKEWQQTFTVNVGGAFNLFRQTMAHFRRQQRGAIVTVCSDAAHTPRIGMSAYGASKAALKSLALTVGLELAASHVRCNIVSPGSTDTDMQRTLWVSDDAEQQRIRGFGEQFKLGIPLGKIARPQEVANTILFLASDLASHITLQDIVVDGGSTLGA

SEQ ID NO: 91715 - protein, 250 aa, Enterobacter cloacae
  REGION 1..250: note = tr|A0A0F0TUU8|A0A0F0TUU8_ENTCL 2,3-dihydroxybenzoate-2,3-dehydrogenase OS=Enterobacter cloacae subsp. cloacae OX=336306 GN=SS44_06950 PE=4 SV=1
MVFDFTGKTVWVTGAGKGIGYATALAFADAGAKVTGFDLAFPQENYPFATQTLDVSDAAQVSDVCGRLLAVEERLDILVNAAGILRMGATDQLSQEDWQQTFAVNVGGAFNLFQQTMGQFRRQQSGAIVTVASDAAHTPRIGMSAYGASKAALKSLALTVGLELAGSGVRCNLVSPGSTDTDMQRTLWTCDDAEQQRIRGFGEQFKLGIPLGKIARPQEIASTILFLASDAASHITLQDIVVDGGSTLGA

SEQ ID NO: 91716 - protein, 251 aa, Enterobacter hormaechei
  REGION 1..251: note = tr|F5RUD3|F5RUD3_9ENTR 2,3-dihydro-2,3-dihydroxybenzoate dehydrogenase; OS = Enterobacter hormaechei ATCC 49162 OX=888063 GN=entA; PE = 4 SV=1
MAGFDFTGKTVWVTGAGKGIGYATALAFVEAGAQVTGFDLAFPQGDYPFATETLDVADAAQVSDVCGRLLSTLERLDVLVNAAGILRMGATDQLSQEDWQQTFAVNVGGAFNLFQQTMGQFRRQQGGAIVTVASDAAHTPRIGMSAYGASKAALKSLALTVGLELAGSGVRCNLVSPGSTDTDMQRTLWTSNDAEQQRIRGFGEQFKLGIPLGKIARPQEIASTVLFLASDAASHITLQDIVIDGGSTLGA

SEQ ID NO: 91717 - protein, 251 aa, Enterobacter hormaechei
  REGION 1..251: note = tr|A0A507ZL72|A0A507ZL72_9ENTR 2,3-dihydro-2,3-dihydroxybenzoate dehydrogenase; OS = Enterobacter hormaechei OX=158836 GN=dhbA PE=4 SV=1
MMAFDFTGKTVWVTGAGKGIGYATALAFVETGAQVTGFDLAFPHGEYPFATETLDVADAAQASDVCGHLLSSLERLDVLVNAAGILRMGATDQLSPEDWQQTFAVNVGGAFNLFQQTMGQFRRQQGGAIVTVASDAAHTPRIGMSAYGASKAALKSLALTVGLELAGSGVRCNLVSPGSTDTDMQRTLWTSDDAEQRRIRGFGEQFKLGIPLGKIARPQEIAATVLFLASDAASHITLQDIVVDGGSTLGA

SEQ ID NO: 91718 - protein, 250 aa, Enterobacter hormaechei
  REGION 1..250: note = tr|A0A4V7S3I9|A0A4V7S3I9_9ENTR 2,3-dihydroxybenzoate-2,3-dehydrogenase OS=Enterobacter hormaechei subsp. xiangfangensis OX=1296536 GN=SS54_15050; PE = 4 SV=1
MAFDFTGKTVWVTGAGKGIGYATALAFVETGAQVTGFDLAFPHGEYPFATETLDVADAAQASDVCGRLLSSLERLDVLVNAAGILRMGATDQLSQEDWQQTFAVNVGGAFNLFQQTMGQFRRQQGGAIVTVASDAAHTPRIGMSAYGASKAALKSLALTVGLELAGSGVRCNLVSPGSTDTDMQRTLWTSDDAEQRRIRGFGEQFKLGIPLGKIARPQEIAATVLFLASDAASHITLQDIVVDGGSTLGA

SEQ ID NO: 91719 - protein, 251 aa, unidentified
  source 1..251: note = Enterobacter huaxiensis
  REGION 1..251: note = tr|A0A3R9PWP2|A0A3R9PWP2_9ENTR 2,3-dihydro-2,3-dihydroxybenzoate dehydrogenase; OS = Enterobacter huaxiensis OX=2494702 GN=dhbA PE=4 SV=1
MMGFDFTGKTVWVTGAGKGIGYATALAFVEAGAQVTGFDLAFPLGDYPFATETLDVANAAQVQEVCGRALASLERLDVLVNAAGILRMGATDQLSQEDWQQTFAVNVGGAFNLFQQTMGQFRRQQGGAIVTVASDAAHTPRIGMSAYGASKAALKSLALTVGLELAGSGVRCNLVSPGSTDTDMQRTLWTSSDAEQLRIRGFGEQFKLGIPLGKIARPQEIASTVLFLASDAASHITLQDIVVDGGSTLGA

SEQ ID NO: 91720 - protein, 250 aa, Enterobacter kobei
  REGION 1..250: note = tr|A0A5E0UXN9|A0A5E0UXN9_9ENTR 2,3-dihydro-2,3-dihydroxybenzoate dehydrogenase; OS = Enterobacter kobei OX=208224 GN=entA_1 PE=4 SV=1
MGFDFTGKTVWVTGAGKGIGYATALAFAEAGAQVTGFDLAFPHGEYPFATETLDVADAAQASDVCGRLLSSLERLDVLVNAAGILRMGATDQLSQEDWQQTFAVNVGGAFNLFQQTMGQFRRQQGGAIVTVASDAAHTPRIGMSAYGASKAALKSLALTVGLELAGSGVRCNLVSPGSTDTDMQRTLWTSDDAEQRRIRGFGEQFKLGIPLGKIARPQEIAATVLFLASDAASHITLQDIVVDGGSTLGA

SEQ ID NO: 91721 - protein, 251 aa, Enterobacter ludwigii
  REGION 1..251: note = tr|W0BRN9|W0BRN9_9ENTR 2,3-dihydroxybenzoate-2,3-dehydrogenase OS=Enterobacter ludwigii OX=299767 GN=M942_19175 PE=4 SV=1
MAGFDFTGKTVWVTGAGKGIGYATARAFVEAGAQVTGFDLAFPQEAYPFATETLDIADAAQVREVCGRALARVERLDVLVNAAGILRMGATDQIAQEDWQQTFAVNVGGAFNLFQQTMGQFRRQQSGAIVTVASDAAHTPRIGMSAYGASKAALKSLALNVGLELAGSGVRCNLVSPGSTDTDMQRTLWKSDDAEQQRIRGFGEQFKLGIPLGKIARPQEIASTVLFLASDAASHITLQDIVVDGGSTLGA

SEQ ID NO: 91722 - protein, 250 aa, unidentified
  source 1..250: note = Enterobacter roggenkampii
  REGION 1..250: note = tr|A0A0W2HMJ6|A0A0W2HMJ6_9ENTR 2,3-dihydroxybenzoate-2,3-dehydrogenase OS=Enterobacter roggenkampii OX=1812935 GN=SS30_11275 PE=4 SV=1
MVFDFTGKTVWVTGAGKGIGYATALAFAEAGAQVTGFDLAFPQDDYPFATETLDVADAGQVHEVCGRVLASLDRLDVLVNAAGILRMGATDQLSQEDWQQTFAVNVGGAFNLFQQTMGQFRRQQGGAIVTVASDAAHAPRIGMSAYGASKAALKSLALTVGLELAGSGVRCNLVSPGSTDTDMQRTLWKSDDAEQQRIRGFGEQFKLGIPLGKIARPQEIAATVLFLASDAASHITLQDIVVDGGSTLGA

SEQ ID NO: 91723 - protein, 250 aa, unidentified
  source 1..250: note = Enterobacter sichuanensis
  REGION 1..250: note = tr|A0A0F1AJQ4|A0A0F1AJQ4_9ENTR 2,3-dihydroxybenzoate-2,3-dehydrogenase OS=Enterobacter sichuanensis OX=2071710 GN=SS37_19735 PE=4 SV=1
MGFDFTGKTVWVTGAGKGIGYATALAFAEAGAQVTGFDLAFPLSDYPFATEALDVANDAQVSEVCGRLLTTVERLDVLVNAAGILRMGATDQLSQADWQQTFAVNVGGAFNLFQQTMGQFRRQQGGAIVTVASDAAHTPRIGMSAYGSSKAALKSLALTVGLELAASGVRCNLVSPGSTDTDMQRTLWKSNDAEQQRIRGFGEQFKLGIPLGKIARPQEIASTVLFLASDAASHITLQDIVVDGGSTLGA

SEQ ID NO: 91724 - protein, 247 aa, Enterobacter soli
  REGION 1..247: note = tr|A0A198GQA4|A0A198GQA4_9ENTR 2,3-dihydro-2,3-dihydroxybenzoate dehydrogenase; OS = Enterobacter soli ATCC BAA-2102 OX=1354262; GN = M987_02274 PE=4 SV=1
MQIDLTGKKALVTGASRGLGRAIALSLARAGADVVITYEKSADKAQAVASEIKALGRHCEAVQADSASAEAIQEAVTHAARTLGGLDILVNNAGIARGGPLEALTIADIDAMINVNIRGVVLTTQEALVHMSDGGRIINIGSCLANRVAMPGIAVYAMTKSALNSFTRGLARDLGPRGITVNLVHPGPTNSDMNPEDGEQAEAQRQMIAVGHYGQPDDIAAAVTFLASPAAGQISGTGLDVDGGLNA

SEQ ID NO: 91725 - protein, 251 aa, Enterobacter sp.
  REGION 1..251: note = tr|A0A0V9DVB1|A0A0V9DVB1_9ENTR 2,3-dihydro-2,3-dihydroxybenzoate dehydrogenase; OS = Enterobacter sp. 50588862 OX=1736698 GN=APT89_01405; PE = 4 SV=1
MAELDFTGKTVWVTGAGKGIGYATALAFVEAGARVTGFDLAFPQDDYPFATETLDVADAAQVGDVCGRLLGTLERLDVLVNAAGILRMGATDELSQEDWQQTFTVNVGGAFNLFQQTMGQFRRQQGGAIVTVASDAAHTPRIGMSAYGASKAALKSLALTVGLELAGSGVRCNLVSPGSTDTDMQRTLWKSDDAEQQRIRGFGEQFKLGIPLGKIARPREIAATVLFLASDAASHITLQDIVVDGGSTLGA

SEQ ID NO: 91726 - protein, 251 aa, Enterobacter sp.
  REGION 1..251: note = tr|A0A5F0JWS8|A0A5F0JWS8_9ENTR 2,3-dihydro-2,3-dihydroxybenzoate dehydrogenase; OS = Enterobacter sp. A11 OX=1217049 GN=dhbA PE=4 SV=1
MAGFDFSGKSVWVTGAGKGIGYATALAFVDAGAKVTGFDLAFPQGDYPFATEKLDVADAEQVADVCGRMFATLDRLDVLVNAAGILRMGATDRLSQEEWQQTFAVNVGGAFNLFQQTMGQFRRQQGGAIVTVASDAAHTPRIGMSAYGASKAALKSLALTVGLELAGSGVRCNLVSPGSTDTDMQRTLWKSGDAEQQRIRGFGEQFKLGIPLGKIARPQEIANTILFLASDYASHITLQDIVVDGGSTLGA

SEQ ID NO: 91727 - protein, 251 aa, Enterobacter sp.; identical to SEQ ID NO: 91712
  REGION 1..251: note = tr|A0A4S3EN26|A0A4S3EN26_9ENTR 2,3-dihydro-2,3-dihydroxybenzoate dehydrogenase; OS = Enterobacter sp. AD2-3 OX=2547834 GN=dhbA PE=4 SV=1

SEQ ID NO: 91728 - protein, 250 aa, Enterobacter sp.
  REGION 1..250: note = tr|W7PFS3|W7PFS3_9ENTR 2,3-dihydro-2,3-dihydroxybenzoate dehydrogenase; OS = Enterobacter sp. DC4 OX=1395580 GN=entA PE=4 SV=1
MGLDFTGKTVWVTGAGKGIGYATALAFVDAGAQVTGFDLAFPQDDYPFATETLDVANAAQVHEVCGRVLTSLERLDVLVNAAGILRMGATDQLSQEDWQQTFAVNVGGAFNLFQLTMGQFRRQQGGAIVTVASDAAHTPRIGMSAYGASKAALKSLALTVGLELAGSGVRCNLVSPGSTDTDMQRTLWKSDDAEQQRIRGFGEQFKLGIPLGKIARPQEIASTVLFLASDAASHITLQDIVVDGGSTLGA

SEQ ID NO: 91729 - protein, 249 aa, Enterobacter sp.
  REGION 1..249: note = tr|A0A5J6W8S0|A0A5J6W8S0_9ENTR 2,3-dihydro-2,3-dihydroxybenzoate dehydrogenase; OS = Enterobacter sp. E76 OX=2596949 GN=dhbA PE=4 SV=1
MAGMFDGKTVWVTGAGKGIGYAAALAFQQQGATVIGLDRAFNGDYPFATEQLDIADAGQVAEVCERLLAAQPRLDVLVNAAGILRMGPTDALSLADWQQTFAVNVGGAFNLYQRLMPVFRTQRGGAIVTVASDAAHTPRIGMSAYGASKAALKSLTLTVGLELAPFGVRVNLVSPGSTDTDMQRTLWTTDDAEQRRIAGFAEQFKLGIPLGKIAKPQEIASTILFLASDQASHITLQDIVIDGGSTLGA

SEQ ID NO: 91730 - protein, 250 aa, Enterobacter sp.
  REGION 1..250: note = tr|A0A5C1CWC7|A0A5C1CWC7_9ENTR 2,3-dihydro-2,3-dihydroxybenzoate dehydrogenase; OS = Enterobacter sp. LU1 OX=1848517 GN=dhbA PE=4 SV=1
MVFDFTGKTVWVTGAGKGIGYATALAFVEAGAQVTGFDLAFPHGEYPFATETLDVADAAQASDVCGRLLSSLERLDVLVNAAGILRMGATDQLSQEDWQQTFAVNVGGAFNLFQQTMGQFRHQQGGAIVTVASDAAHTPRIGMSAYGASKAALKSLALTVGLELAGSGVRCNLVSPGSTDTDMQRTLWTSDDAEQRRIRGFGEQFKLGIPLGKIARPQEIAATVLFLASDAASHITLQDIVVDGGSTLGA

SEQ ID NO: 91731 - protein, 250 aa, Enterobacter sp.
  REGION 1..250: note = tr|A0A495ALR8|A0A495ALR8_9ENTR 2,3-dihydro-2,3-dihydroxybenzoate dehydrogenase; OS = Enterobacter sp. R1(2018) OX=2447891 GN=dhbA PE=4 SV=1
MNMDFSGQRVWVTGAGKGIGYHTALAFSAAGATVIGFDLAFPLEVYPFATETLNVADAQQVAAAAQRLLSDAPQLDVLVNAAGILRMGATDALSLQDWQDTFAVNVGGAFNMFRATMPRFREQRSGAMVTVASDAAHTPRTGMSAYGASKAALKSLALTVGLELAPFGVRCNLVSPGSTDTDMQRTLWKTPDAEQQRIKGFPEQFKLGIPLGKIARPQEIVSTIMFLASGHASHITLQDIVIDGGATLGA

SEQ ID NO: 91732 - protein, 251 aa, Enterobacter sp.
  REGION 1..251: note = tr|R9VRA6|R9VRA6_9ENTR 2,3-dihydroxybenzoate-2,3-dehydrogenase OS=Enterobacter sp. R4-368 OX=1166130 GN=H650_21625 PE=4 SV=1
MVGLDFTGKIVWVTGAGKGIGYATAKAFVGAGAHVIGFDLAFGGTDYPFSCEVLDVADAAQVQVVCQRVLAQCERLDVLVNAAGVLHMAATDELTPDAWHSTFAVNVGGAFNLFQQTMAQFRRQQSGAIVTVASDAAHTPRIGMSAYGASKAALKSLALTVGLELAASHVRCNVVSPGSTDTDMQRLLWVSDDAEQQRIRGFGEQFKLGIPLGKIARPQEVANTILFLASDLASHITLQDIVVDGGSTLGA

SEQ ID NO: 91733 - protein, 251 aa, Enterobacter sp.
  REGION 1..251: note = tr|A0A329H414|A0A329H414_9ENTR 2,3-dihydro-2,3-dihydroxybenzoate dehydrogenase; OS = Enterobacter sp. RIT 418 OX=2202164 GN=DBY73_020075; PE = 4 SV=1
MMAFDFTGKNVWVTGAGKGIGYATARAFSEAGARVTGFDLAFPLDDYPFATETLNVADAVQVRDVCGRLLGRVERLDVLVNAAGILRMGATEQLTQEDWQQTFAVNVGGAFNLFQQTMGQFRRQQGGAIVTVASDAAHTPRIGMSAYGASKAALKSLALTVGLELAGSGVRCNLVSPGSTDTDMQRTLWTRDDAEQQRIRGFGEQFKLGIPLGKIARPQEIASTVLFLASDAASHITLQDIVVDGGSTLGA

SEQ ID NO: 91734 - protein, 250 aa, Enterobacter sp.
  REGION 1..250: note = tr|A0A5D9BYP5|A0A5D9BYP5_9ENTR 2,3-dihydro-2,3-dihydroxybenzoate dehydrogenase; OS = Enterobacter sp. RVSM5a OX=2605743 GN=dhbA PE=4 SV=1
MAFDFTGKTVWVTGAGKGIGYATALAFVEAGAQVTGFDLAFPHGEYPFATETLDVADAAQASDVCGHLLSSLERLDVLVNAAGILRMGATDQLSQEDWQQTFAVNVGGAFNLFQQTMGQFRHQQGGAIVTVASDAAHTPRIGMSAYGASKAALKSLALTVGLELAGSGVRCNLVSPGSTDTDMQRTLWTSDDAEQRRIRGFGEQFKLGIPLGKIARPQEIAATVLFLASDAASHITLQDIVVDGGSTLGA

SEQ ID NO: 91735 - protein, 250 aa, Enterobacter sp.
  REGION 1..250: note = tr|A0A3S0H9S2|A0A3S0H9S2_9ENTR 2,3-dihydro-2,3-dihydroxybenzoate dehydrogenase; OS = Enterobacter sp. WCHEn090040 OX=2497436 GN=dhbA PE=4; SV = 1
MGWDFTGKTVWVTGAGKGIGYATALAFAEAGAQVTGFDLAFPQDHYPFATETLDVADAAQVHEVCGRVLASLERLDVLVNAAGILRMGATDQLSQKDWQDTFAVNVGGAFNLFQQTMGQFRRQQGGAIVTVASDAAHAPRIGMSAYGASKAALKSLALTVGLELAGSGVRCNLVSPGSTDTDMQRTLWKGDDAEQQRIRGFGEQFKLGIPLGKIARPQEIAATVLFLASDAASHITLQDIVVDGGSTLGA

SEQ ID NO: 91736 - protein, 251 aa, Enterobacter sp.
  REGION 1..251: note = tr|A0A4R0GEZ7|A0A4R0GEZ7_9ENTR 2,3-dihydro-2,3-dihydroxybenzoate dehydrogenase; OS = Enterobacter sp. WCHEs120002 OX=2529381 GN=dhbA PE=4; SV = 1
MMGFDFTGKTVWVTGAGKGIGYATALAFVEAGAQVTGFDLAFPLGDYPFATETLDVADFAQVSDACGRLLNTLERLDVLVNAAGILRMGATDALSQEDWQQTFAVNVGGAFNLFQQTMGQFRRQQGGAIVTVASDAAHTPRIGMSAYGASKAALKSLALTVGLELAGSGVRCNLVSPGSTDTDMQRTLWKSDDAEQQRIRGFGEQFKLGIPLGKIARPQEIAGTVLFLASDAASHITLQDIVVDGGSTLGA

SEQ ID NO: 91737 - protein, 251 aa, Enterobacter sp.
  REGION 1..251: note = tr|A0A4V2LUY4|A0A4V2LUY4_9ENTR 2,3-dihydro-2,3-dihydroxybenzoate dehydrogenase; OS = Enterobacter sp. WCHEs120003 OX=2529382 GN=dhbA PE=4; SV = 1
MAGFDFTGKTVWVTGAGKGIGYATALAFVEAGARVTGFDLAFPQDDYPFATETLDVADAAQVGDVCGRLLGTLERLDVLVNAAGILRMGATDELSLEDWQQTFAVNVGGAFNLFQQTMGQFHRQQGGAIVTVASDAAHTPRIGMSAYGASKAALKSLALTVGLELAGSGVRCNLVSPGSTDTDMQRTLWKSDDAEQQRIRGFGEQFKLGIPLGKIARPQEIAATVLFLASDAASHITLQDIVVDGGSTLGA

SEQ ID NO: 91738 - protein, 251 aa, unidentified
  source 1..251: note = Enterobacteriaceae bacterium
  REGION 1..251: note = tr|A0A427C418|A0A427C418_9ENTR 2,3-dihydro-2,3-dihydroxybenzoate dehydrogenase; OS = Enterobacteriaceae bacterium CCUG 66741 OX=1851514; GN = dhbA PE=4 SV=1
MAGFDFHGKTVWVTGAGKGIGYATARAFVEAGAEVTGFDLAFDQADYPFATVKMDVADPQQVMLVCAPLLHDLARLDVLVNAAGILRMGATDTLSQADWQQTFAVNVGGAFNLFQQTMATFRQQQGGAIVTVASDAAHTPRIGMSAYGASKAALKSLALTVGLELSASGVRCNLVSPGSTDTDMQRTLWVSDDAEQQRIRGFGEQFKLGIPLGKIARPQEIASTILFLASDSASHITLQDIVVDGGSTLGA

SEQ ID NO: 91739 - protein, 71 aa, unidentified
  source 1..71: note = Enterobacteriaceae bacterium
  REGION 1..71: note = tr|A0A351NKC6|A0A351NKC6_9ENTR 2,3-dihydro-2,3-dihydroxybenzoate dehydrogenase (Fragment); OS = Enterobacteriaceae bacterium OX=1849603 GN=DCX28_04710; PE = 4 SV=1
MAGLDFSGKTVWVTGAGKGIGYATALAFAEAGALVTGFDRDFSHATYPFACETLDIANADQVAAVSQRLLA

SEQ ID NO: 91740 - protein, 201 aa, Enterococcus casseliflavus
  REGION 1..201: note = tr|A0A377KS52|A0A377KS52_ENTCA 2,3-dihydro-2,3-dihydroxybenzoate dehydrogenase; OS = Enterococcus casseliflavus OX=37734 GN=entA PE=4 SV=1
MKLLLIGHTGTLGQLLVEGFQQLPEVELITASRSSGDHQVEIADAASVSQLFAATGKVDAIVSAAGSTVFKPFEELTPADIQQSVASKLQGQVNLALIGQHFLTEGGSITLTSGIIKDEFIPMGTPSALVNGGLEAFVASAAFEIGHGVRINAVSPNALVGSWETFADSFKGFIPVGDAPVFAAYQKAVFGIMTGKTFTVY

SEQ ID NO: 91741 - protein, 248 aa, Enterococcus durans
  REGION 1..248: note = tr|A0A557ZLE9|A0A557ZLE9_9ENTE 2,3-dihydro-2,3-dihydroxybenzoate dehydrogenase; OS = Enterococcus durans OX=53345 GN=dhbA PE=4 SV=1
MDFSGKNVWVTGAGKGIGYATALAFVEAGAKVTGFDQAFAQEQYPFATEVMDVADAAQVAQVCQRLLAETERLDVLVNAAGILRMGATDQLSKEDWQQTFAVNVGGAFNLFQQTMNQFRRQRGGAIVTVASDAAHTPRIGMSAYGASKAALKSLALSVGLELAGSGVRCNVVSPGSTDTDMQRTLWVSDDAEEQRIRGFGEQFKLGIPLGKIARPQEIANTILFLASDLASHITLQDIVVDGGSTLGA

SEQ ID NO: 91742 - protein, 250 aa, unidentified
  source 1..250: note = Erwinia gerundensis
  REGION 1..250: note = tr|A0A0U5KXU2|A0A0U5KXU2_9GAMM 2,3-dihydro-2,3-dihydroxybenzoate dehydrogenase OS=Erwinia gerundensis OX=1619313 GN=entA PE=4 SV=1
MNIDFTAKQVWVTGAGQGIGYHIALAFQQAGAQVVGFDRQFRQTDYPFRCVTLDVADADQVARVCQPLLAEQKQLDVLVNGAGILRIGATDTLPVADFQALMAVNVGGAFNLFQQTLPRFREQRSGAIVTLASNSAHAPRIGMSAYGASKAALRSLCLSVALEMAPHGVRCNLVSPGSTDTDMQRSLWHTPDAEQRTIAGFPDQYKIGIPLQKIAQPQEIANAVLFLASDLASHIVMQDIVIDGGATLGA

SEQ ID NO: 91743 - protein, 252 aa, Erwinia piriflorinigrans
  REGION 1..252: note = tr|V5Z3W4|V5Z3W4_9GAMM 2,3-dihydroxybenzoate-2,3-dehydrogenase OS=Erwinia piriflorinigrans CFBP 5888 OX=1161919 GN=cbsA PE=4 SV=1
MTCRFDFSGKQVWVTGAGQGIGYHTALAFVAAGASVVGFDRQFSQREYPFQRVTVDIADAAAVKRTCQRLLAEARRLDVLVNAAGILRIGSTEELALEDWQDCMAVNAGGAFNLFQQALPLFRQQRSGAIVTIASNAAHAPRIGMSAYGASKAALRSLCLTVGLEMAPFGVRCNIVSPGSTDTAMQRSLWHQPEDEQQMIAGYPEQYKLGIPLQKIAKPDDIANAVLFLASDSAGHIVMQDIVIDGGATLGA

SEQ ID NO: 91744 - protein, 250 aa, Erwinia sp.
  REGION 1..250: note = tr|A0A3R8ZXS8|A0A3R8ZXS8_9GAMM 2,3-dihydro-2,3-dihydroxybenzoate dehydrogenase OS=Erwinia sp. 198 OX=2022746 GN=dhbA PE=4 SV=1
MSLDFTNKHIWVTGAGKGIGYATALAFHEAGATVVGLDLAFPQADYPFQTVELNVADAQQVKAVCQRLRPETPRLDVLVNGAGILRMGATDELDVADWEAVMAVNVGGAFNLFQQTMPWFREQRGGAIVTVASDAAHCPRIGMSAYGASKAALRSLSLTVGLELASFGVRCNLVSPGSTDTDMQRTLWKSPDAEQQRIRGFAEQFKVGIPLGKIARPGEVASTILFLASDQASHITMQDIVIDGGSTLGA

SEQ ID NO: 91745 - protein, 252 aa, Erwinia sp.
  REGION 1..252: note = tr|A0A0Q4NMJ7|A0A0Q4NMJ7_9GAMM 2,3-dihydro-2,3-dihydroxybenzoate dehydrogenase OS=Erwinia sp. Leaf53 OX=1736225 GN=ASF13_00385 PE=4 SV=1
MSCQFDFSDKQVWVTGAGQGIGYHTALAFVAAGASVVGFDRQFSQSDYPFQRVIVDIADAGQVKNVCERLLADIPRLDVLVNAAGILRTGSTETLAVEDWQACMAVNAGGAFNLFQQTLPLFRQQRGGAIVTVASNAAHAPRIGMSAYGASKAALRSLCMTVALEMAPFGVRCNIVSPGSTDTAMQRSLWHRPEDEQQMIAGYPDQYKLGIPLGKIAQPEEIASAILFLASDNASHIVMQDIVVDGGATLGA

SEQ ID NO: 91746 - protein, 248 aa, Escherichia albertii
  REGION 1..248: note = tr|B1EKD6|B1EKD6_ESCAT 2,3-dihydro-2,3-dihydroxybenzoate dehydrogenase; OS = Escherichia albertii (strain TW07627) OX=502347 GN=entA; PE = 4 SV=1
MDFSGKNVWVTGAGKGIGYATALAFVEAGAKVTGFDQAFAQEQYPFATEVMDVADAVQVAQVCQRLLAETERLDVLVNAAGILRMGATDQLSKEDWQQTFAVNVGGAFNLFQQTMNQFRRQRGGAIVTVASDAAHTPRIGMSAYGASKAALKSLALSVGLELAGSGVRCNVVSPGSTDTDMQRMLWVSDDAEEQRIRGFGEQFKLGIPLGKIARPQEIANTILFLASDLASHITLQDIVVDGGSTLGA

SEQ ID NO: 91747 - protein, 248 aa, Escherichia albertii
  REGION 1..248: note = tr|A0A4Q9IUV5|A0A4Q9IUV5_9ESCH 2,3-dihydro-2,3-dihydroxybenzoate dehydrogenase; OS = Escherichia albertii OX=208962 GN=dhbA PE=4 SV=1
MDFSGKNVWVTGAGKGIGYATALAFVEAGAKVTGFDQAFAQEQYPFATEMMDVADAVQVAQVCQRLLAETERLDVLVNAAGILRMGATDQLSKEDWQQTFAVNVGGAFNLFQQTMNQFRRQRGGAIVTVASDAAHTPRIGMSAYGASKAALKSLALSVGLELAGSGVRCNVVSPGSTDTDMQRMLWVSDDAEEQRIRGFGEQFKLGIPLGKIARPQEIANTILFLASDLASHITLQDVVVDGGSTLGA

SEQ ID NO: 91748 - protein, 248 aa, Escherichia coli
  REGION 1..248: note = tr|B7L8H9|B7L8H9_ECO55 EntA protein OS=Escherichia coli (strain 55989 / EAEC) OX=585055 GN=entA PE=4 SV=1
MDFSGKNVWVTGAGKGIGYATALAFVEAGAKVTGFDQAFTQEQYPFATEVMDVADAGQVAQVCQRLLAETERLDVLINAAGILRMGATDQLSKEDWQQTFAVNVGGAFNLFQQTMNQFRRQRGGAIVTVASDAAHTPRIGMSAYGASKAALKSLALSVGLELAGSGVRCNVVSPGSTDTDMQRTLWVSDDAEEQRIRGFGEQFKLGIPLGKIARPQEIANTILFLASDLASHITLQDIVVDGGSTLGA

SEQ ID NO: 91749 - protein, 248 aa, Escherichia coli; identical to SEQ ID NO: 91409
  REGION 1..248: note = sp|P15047|ENTA_ECOLI 2,3-dihydro-2,3-dihydroxybenzoate dehydrogenase; OS = Escherichia coli (strain K12) OX=83333 GN=entA PE=1 SV=1

SEQ ID NO: 91750 - protein, 248 aa, Escherichia coli
  REGION 1..248: note = tr|B1LKI9|B1LKI9_ECOSM 2,3-dihydro-2,3-dihydroxybenzoate dehydrogenase; OS = Escherichia coli (strain SMS-3-5 / SECEC) OX=439855; GN = entA PE=4 SV=1
MDFSGKNVWVTGAGKGIGYATALAFVEAGAKVTGFDQAFAQEQYPFATEVMDVADAAQVAQVCQRLLAQTERLDVLVNAAGILRMGATDQLSKEDWQQTFAVNVGGAFNLFQQTMNQFRRQRGGAIVTVASDAAHTPRIGMSAYGASKAALKSLALSVGLELAGSGVRCNVVSPGSTDTDMQRTLWVSDDAEEQRIRGFGEQFKLGIPLGKIARPQEIANTILFLASDLASHITLQDIVVDGGSTLGA

SEQ ID NO: 91751 - protein, 248 aa, Escherichia coli
  REGION 1..248: note = tr|Q1REW6|Q1REW6_ECOUT 2,3-dihydro-2,3-dihydroxybenzoate OS=Escherichia coli (strain UTI89 / UPEC) OX=364106 GN=entA PE=4 SV=1
MDFSGKNVWITGAGKGIGYATALAFVEAGAKVTGFDQAFTQEQYPFATEVMDVADAAQVAQVCQRLLAETERLDVLVNAAGILRMGATDQLSKEDWQQTFAVNVGGAFNLFQQTMNQFRRQRGGAIVTVASDAAHTPRIGMSAYGASKAALKSLALSVGLELAGSGVRCNVVSPGSTDTDMQRTLWVSDDAEEQRIRGFGEQFKLGIPLGKIARPQEIANTILFLASDLASHITLQDIVVDGGSTLGA

SEQ ID NO: 91752 - protein, 248 aa, Escherichia coli
  REGION 1..248: note = tr|B7MRN4|B7MRN4_ECO81 2,3-dihydro-2,3-dihydroxybenzoate dehydrogenase; OS = Escherichia coli O81 (strain ED1a) OX=585397 GN=entA; PE = 4 SV=1
MDFSGKNVWVTGAGKGIGYATALAFVEAGAKVTGFDQAFTQEQYPFATEVMDVADAAQVAQVCQRLLAETERLDVLVNAAGILRMGATDQLSKEDWQQTFAVNVGGAFNLFQQTMNQFRRQRGGAIVTVASDAAHTPRIGMSAYGASKAALKSLALSVGLELAGSGVRCNVVSPGSTDTDMQRTLWVSDDAEEQRIRGFGEQFKLGIPLGKIARPQEIANTILFLASDLASHITLQDIVVDGGSTLGA

SEQ ID NO: 91753 - protein, 248 aa, Escherichia coli; identical to SEQ ID NO: 91752
  REGION 1..248: note = tr|A0A0H3EG28|A0A0H3EG28_ECO8N 2,3-dihydroxybenzoate-2,3-dehydrogenase OS=Escherichia coli O83:H1 (strain NRG 857C / AIEC) OX=685038; GN = NRG857_02705 PE=4 SV=1

SEQ ID NO: 91754 - protein, 108 aa, Escherichia coli
  REGION 1..108: note = tr|A0A376DDE9|A0A376DDE9_ECOLX 2,3-dihydroxybenzoate-2,3-dehydrogenase OS=Escherichia coli OX=562 GN=entA_2 PE=4 SV=1
MSAYGASKAALKSLALSVGLELAGSGVRCNVVSPGSTDTDMQRTLWVSDDAEEQRIRGFGEQFKLGIPLGKIARPQEIANTILFLASDLASHITLQDIVVDGGSTLGA

SEQ ID NO: 91755 - protein, 248 aa, Escherichia fergusonii
  REGION 1..248: note = tr|B7LLK4|B7LLK4_ESCF3 2,3-dihydro-2,3-dihydroxybenzoate dehydrogenase; OS = Escherichia fergusonii (strain ATCC 35469 / DSM 13698 / CDC 0568-73) OX=585054 GN=entA PE=4SV=1
MDFSGKNVWVTGAGKGIGYATALAFVEAGAKVTGFDQAFTLEQYPFATEVMDVADAAQVAQVCQRLLAQTERLDVLVNAAGILRMGATDQLSKEDWQQTFSVNVGGAFNLFQQTMNQFRRQRGGAIVTVASDAAHTPRIGMSAYGASKAALKSLALSVGLELAGSGVRCNVVSPGSTDTDMQRTLWVSDDAEEQRIRGFGEQFKLGIPLGKIARPQEIANTILFLASDLASHITLQDIVVDGGSTLGA

SEQ ID NO: 91756 - protein, 248 aa, unidentified
  source 1..248: note = Escherichia marmotae
  REGION 1..248: note = tr|A0A370V3R7|A0A370V3R7_9ESCH 2,3-dihydro-2,3-dihydroxybenzoate dehydrogenase; OS = Escherichia marmotae OX=1499973 GN=entA PE=4 SV=1
MNFSGKNVWVTGAGKGIGYATALAFVDAGAKVTGFDRAFTLEHYPFATEVLDVADAGQVAQVCQRLLGETQRLDVLVNAAGILRMGATDQLSKEDWQQTFAVNVGGAFNLFQQTMNQFRRQRGGAIVTVASDAAHTPRIGMSAYGASKAALKSLALSVGLELAGSGVRCNVVSPGSTDTDMQRTLWVSDDAEEQRIRGFGEQFKLGIPLGKIARPQEIANTILFLASDLASHITLQDIVVDGGSTLGA

SEQ ID NO: 91757 - protein, 248 aa, Escherichia sp.
  REGION 1..248: note = tr|A0A4Q9JTD3|A0A4Q9JTD3_9ESCH 2,3-dihydro-2,3-dihydroxybenzoate dehydrogenase; OS = Escherichia sp. E10V4 OX=2478971 GN=dhbA PE=4 SV=1
MDFSGKNVWVTGAGKGIGYATALAFVEAGAKVTGFDQAFAQEQYPFATEVMDVADAALVAQVCQRLLAETERLDVLVNAAGILRMGATDQLSKEDWQQTFAVNVGGAFNLFQQTMNQFRRQRGGAIVTVASDAAHTPRIGMSAYGASKAALKSLALSVGLELAGSGVRCNVVSPGSTDTDMQRTLWVSDDAEEQRIRGFGEQFKLGIPLGKIARPQEIANTILFLASDLASHITLQDIVVDGGSTLGA

SEQ ID NO: 91758 - protein, 248 aa, Escherichia sp.
  REGION 1..248: note = tr|A0A4P9DGB0|A0A4P9DGB0_9ESCH 2,3-dihydro-2,3-dihydroxybenzoate dehydrogenase; OS = Escherichia sp. E4742 OX=2044467 GN=dhbA PE=4 SV=1
MDFSGKNVWVTGAGKGIGYATALAFVEAGAKVTGFDQAFAQENYPFTTEVMDVADAAQVAQVCQRLLAQTERLDVLVNAAGILRMGATDQLSKEDWQQTFAVNVGGAFNLFQQTMNQFRRQRGGAIVTVASDAAHTPRIGMSAYGASKAALKSLALSVGLELAGSGVRCNVVSPGSTDTDMQRTLWVSDDAEEQRIRGFGEQFKLGIPLGKIARPQEIANTILFLASDLASHITLQDIVVDGGSTLGA

SEQ ID NO: 91759 - protein, 248 aa, Escherichia sp.
  REGION 1..248: note = tr|A0A4U6CGA2|A0A4U6CGA2_9ESCH 2,3-dihydro-2,3-dihydroxybenzoate dehydrogenase; OS = Escherichia sp. MR OX=2575922 GN=dhbA PE=4 SV=1
MDFSGKNVWVTGAGKGIGYATALAFVEAGAKVTGFDRVFTQEQYPFATEVMDVADAGQVAQVCQRLLAETERLDVLVNAAGILRMGATDQLSKEDWQQTFAVNVGGAFNLFQQTMNQFRRQRGGAIVTVASDAAHTPRIGMSAYGASKAALKSLALSVGLELAGSGVRCNVVSPGSTDTDMQRTLWVSDDAEEQRIRGFGEQFKLGIPLGKIARPQEIANTILFLASDLASHITLQDIVVDGGSTLGA

SEQ ID NO: 91760 - protein, 323 aa, Ewingella americana
  REGION 1..323: note = tr|A0A377TGS1|A0A377TGS1_9GAMM 2,3-dihydro-2,3-dihydroxybenzoate dehydrogenase; OS = Ewingella americana OX=41202 GN=entA PE=4 SV=1
MTTQQQPLHSGFDKNSTASEVLGSRDLTGVNVIVTGGYSGIGLETVRVLAEAGAQVRVPTRDEEKAKEALKGIPNVETDFLDLMDPASIDAFAERFLATGRPLHILINSAGVMASPLHRDARGNEWQFSTNHLGHYKLTARLLPALKKADGARVVCVSSRGHRFAGIDFADPNFNQRPYDKWLAYGQSKSANALFALQLDKLGEAHNIRAFSLHPGAIFTALTRHMEKSDYQRVGALNEKGEVKTTEEAGFKTVEQGAATSVWCATHPSLAGKGGVYCEDADIAPLAAEDGAEVGVSSWAIDPEAAKRLWQLSETLTGVRYVW

SEQ ID NO: 91761 - protein, 282 aa, unidentified
  source 1..282: note = Flagellimonas maritima
  REGION 1..282: note = tr|A0A2Z4LQ29|A0A2Z4LQ29_9FLAO 2,3-dihydro-2,3-dihydroxybenzoate dehydrogenase; OS = Flagellimonas maritima OX=1383885 GN=entA PE=3 SV=1
MEDTKYRELKNKVVVITGGGGILCSTLARSLGAQNAKVAVLDLKEEVAQEVAKTINKKGGAAIGVVADVLDINSLKAAHKRVSKELGKCDILINGAGGNHPSGTTSNPFLEEEDLSLSNLKTFFDLEMEGIQFTFNLNFIGTLLPTQVFSKDMIGRSGCSVLNISSMNAFTPLTKIPAYSGAKAAVSNFTQWLAVHFSKVGIRVNALAPGFFLTDQNRNLLTNKDSSLTLRGQTIIDHTPMGRYGNPEDIVGATLWLCGEGASFVTGVIIPIDGGFSAFSGV

SEQ ID NO: 91762 - protein, 250 aa, unidentified
  source 1..250: note = Franconibacter pulveris
  REGION 1..250: note = tr|A0A0J8VJA5|A0A0J8VJA5_9ENTR 2,3-dihydroxybenzoate-2,3-dehydrogenase OS=Franconibacter pulveris OX=435910 GN=ACH50_18450 PE=4 SV=1
MSLDFSGQTVWVTGAGKGIGYATALAFVEAGASVVGFDLAFEQENYPFACETLDVADAAAVARTCQRLLAAEKRLDVLINAAGILRMGPTDALSATDWQQTFAVNVGGAFNFFQQTMAQFRAQKGGAIVTVASDAAHTPRIGMSAYGASKAALKSLALTVGLELAPFGVRANLVSPGSTDTDMQRTLWKSEDAEQQRIRGFAEQFKLGIPLGKIARPQEIANAILFLASAQASHTTLQDLVIDGGSTLGA

SEQ ID NO: 91763 - protein, 287 aa, Frankia sp.
  REGION 1..287: note = tr|A0A4R1D766|A0A4R1D766_9ACTN 2,3-dihydro-2,3-dihydroxybenzoate dehydrogenase OS=Frankia sp. BMG5.11 OX=222540 GN=E0504_04555 PE=4 SV=1
MTTTAQTKTAQTTTAQTTTTPRAGGSTAPGGPSSGGVTLVTGAAGGIGASVARALAVEGTPVALVDRSAEPLWRLADELAGAGRQVLAVAADVTVSADVDAAVAKVEAELGAIGGLVNAAGVLRTGAVTALADEDWEQTLAVNAGGVFHVCRAVARRMVPRGAGSIVTVASNAARTPRTGMAAYGASKAAATMITKVLGLELAGHGIRCNIVAPGSTRTPMLTALAGDAAERASIEGTAATFRLGIPTGRIAEPDQIADAVLFLLSDRAAQITLHELTVDGGATLGA

SEQ ID NO: 91764 - protein, 287 aa, Frankia sp.
  REGION 1..287: note = tr|A0A2X3KXR1|A0A2X3KXR1_9ACTN 2,3-dihydro-2,3-dihydroxybenzoate dehydrogenase OS=Frankia sp. Ea1.12 OX=573499 GN=dhbA PE=4 SV=1
MTTTAQTKTAQTTTAQTTTTPRAGGSTAPGGPSSGGVTLVTGAAGGIGASVARALAVEGTPVALVDRSAEPLWRLADELAGAGRQVLAVAADVTVSADVDAAVAKVEAELGAIGGLVNAAGVLRTGAVTALADEDWEQTLAVNAGGVFRVCRAVARRMVPRGAGSIVTVASNAARTPRTGMAAYGASKAAATMITKVLGLELAGHGIRCNIVAPGSTRTPMLTALAGDAAERASIEGTAATFRLGIPTGRIAEPDQIADAVLFLLSDRAAQITLHELTVDGGATLGA

SEQ ID NO: 91765 - protein, 254 aa, Gemmatimonas aurantiaca
  REGION 1..254: note = tr|C1ACN2|C1ACN2_GEMAT 2,3-dihydro-2,3-dihydroxybenzoate dehydrogenase; OS = Gemmatimonas aurantiaca (strain T-27 / DSM 14586 / JCM 11422 / NBRC 100505) OX=379066 GN=GA U_3217 PE=4 SV=1
MTHPGLVGGVAIVSGAAGGIGSEVVSALLHAGARVVAFDQQIPTRTDADDSRYRAFAVDVSQSAAVEALVAQTIAEWGPVRFGVNVAGVLHTASVVDTDDTQWDRLFAVNTTGVFNLSRALARHMMTERQGSIVTVASNAGGVPRQGMAAYGASKAAASLFTRSLGLELAPFGVRCNVVSPGSTRTPMLEAMLAEHGMDSVIAGSPAQFKIGIPLAKLAEPRDVADAVLFLLSDRAGHITMNELFVDGGASLHG

SEQ ID NO: 91766 - protein, 261 aa, Geobacillus sp.
  REGION 1..261: note = tr|A0A0Q0UN66|A0A0Q0UN66_9BACI 2,3-dihydro-2,3-dihydroxybenzoate dehydrogenase; OS = Geobacillus sp. PA-3 OX=1699078 GN=dhbA PE=3 SV=1
MDQWGIAGKVALVTGAAQGIGEAVVRAFVKHGALVAAVDRNGGRLDALVSELQGQGYRVQSFLADVANRTQVDEVVEKVEHSLGPIEILVNVAGILRTGPVSSLADQDWEEVFKVNATGVFYVSRAVSQRMIPRRSGAIVTVSSNAATTPRMSMAAYAASKAAATMFTKCLGLELAPYHIRCNVVSPGSTETDMQRAMWTDDNGANKVIAGSLEEYRLGIPLKKLAQPSDIADAVLFLASEQSRHITLHDLRVDGGATLDS

SEQ ID NO: 91767 - protein, 261 aa, Geobacillus thermodenitrificans; identical to SEQ ID NO: 91766
  REGION 1..261: note = tr|A0A1W6VMG5|A0A1W6VMG5_GEOTD Vibriobactin-specific 2,3-dihydro-2,3-dihydroxybenzoate dehydrogenase; OS = Geobacillus thermodenitrificans OX=33940 GN=vibA PE=3; SV = 1

SEQ ID NO: 91768 - protein, 252 aa, unidentified
  source 1..252: note = Glutamicibacter arilaitensis
  REGION 1..252: note = tr|E1W0T6|E1W0T6_GLUAR 2,3-dihydro-2,3-dihydroxybenzoate dehydrogenase; OS = Glutamicibacter arilaitensis (strain DSM 16368 / CIP 108037 / IAM 15318 / JCM 13566 / Re117 ) OX=861360 GN=dhbA; PE = 4 SV=1
MNDVVAKPLIVVTGASGGIGSAVAAKLGDSGYSVLATDRAGDDVLTADISSPEGISELEAAIEHRIERGQVLEGLVNVAGVLHPGKLLDLQPEQWEHMQSVNAQSVFRMTQLVARLMIDQRDQDPGNSRSIVTVSSNAGRTPRYGMAGYCASKAAATMVTRCFSLELAAHGIRANVVSPGSTRTAMLLGMNGEAEMNRASVAGNPAQFRNGIPLGRIADPEDIADSVAFLLSANAKHLTGIELTVDGGATLS

SEQ ID NO: 91769 - protein, 240 aa, Gordonia polyisoprenivorans
  REGION 1..240: note = tr|H6N4I3|H6N4I3_GORPV 2,3-dihydro-2,3-dihydroxybenzoate dehydrogenase DhbA; OS = Gordonia polyisoprenivorans (strain DSM 44266 / VH2); OX = 1112204 GN=dhbA PE=4 SV=1
MKGVRQRTVIVGAAQGIGKAVAQLLGVCGHELVLADVQVDRLAVVASDLRTRGAEVSAHHLDLDDTDSIAKTFDEVGAVSGLVSTAAAMHSADPLTVDPAQFEEVLKLNLIGNYALAQAAARSMISHNSAGSIVVVTSAAARRPHPNIGVYAASKAAVTQALRVLGLATQPYGIRINTVAPTATRTEMLTNEASHGTGVVPEYVNDPDDIANVIAFLLSPASRAINLREIPLDGGTLLGL

SEQ ID NO: 91770 - protein, 239 aa, Gordonia sp.
  REGION 1..239: note = tr|A0A3G8JJH8|A0A3G8JJH8_9ACTN 2,3-dihydro-2,3-dihydroxybenzoate dehydrogenase; OS = Gordonia sp. MMS17-SY073 OX=2420509 GN=entA PE=4 SV=1
MTEAPIAGIAGRRAIVTGAAGGIGRAVVDALRVAGAEVHGWDRAGVGVAVVDVADRSAVQNAWRTTEDACGPVDIVVQAAGVMTDDWNLCMAVNAGGVRNVVDVAVAAMTSRGRGCAVVVSSNAGATPRADLAPYAASKAAATSYARSVALAVAPAGVRVNIVSPGSTDTPMLRGMWSSDADEARVLAGTPNRFRLGIPLGRIADPADIAAAVVYLVSDAARHVTMHDLRVDGGATLDM

SEQ ID NO: 91771 - protein, 254 aa, Gordonia terrae; identical to SEQ ID NO: 91648
  REGION 1..254: note = tr|A0A4V0AJ89|A0A4V0AJ89_9ACTN 2,3-dihydro-2,3-dihydroxybenzoate dehydrogenase; OS = Gordonia terrae OX=2055 GN=entA PE=4 SV=1

SEQ ID NO: 91772 - protein, 254 aa, unidentified
  source 1..254: note = Gynuella sunshinyii
  REGION 1..254: note = tr|A0A0C5VWK7|A0A0C5VWK7_9GAMM Dehydrogenases with different specificities (Related to short-chain alcohol dehydrogenase) OS=Gynuella sunshinyii YC6258 OX=1445510 GN =YC6258_02766 PE=4 SV=1
MTMTELDFSGQSIWVTGAGRGIGFATAQRFTELGAVVTGLDRNFDKPEKYPFHCQSLDLSNADQVAAGCDNILSQRPQIHGLINAAGILHTGSTENISRQAWQDCFNVNVGAAFNLFQQLIPQFKRQRRGSIVTVSSNAAHVPRMQMSAYCASKAALTSLNHCVALELAGYNVRCNVVSPGSTDTDMQRSLWHTPDARQQTINGFPDQYKLGIPLGKIATADEIANTIVFLASDMASHITMQDIIVDGGATFYR

SEQ ID NO: 91773 - protein, 268 aa, Hahella sp.
  REGION 1..268: note = tr|A0A3T0VUX0|A0A3T0VUX0_9GAMM 2,3-dihydro-2,3-dihydroxybenzoate dehydrogenase OS=Hahella sp. KA22 OX=1628392 GN=ENC22_28780 PE=4 SV=1
MSDSTTQSAGADFAGKVAIVTGAAQGIGAAVVAALAESGAKVAALDVQEKALRDTTSTLTARGLQVRPFVVDISDAAAIEAVVGDIEAGLGEVEVLVNVAGILRLASATELTSDDWLDTFAVNTHGVFFLSRAVGRLMKERRRGAIVTVGSNAAAIPRTKMAAYAASKAASTHFTKCLGLELAEYGVRCNIVSPGSTDTAMQRQFWTDDQALEAVLNGSLDSYRTGIPLKRIATPEDIAEAVTFLASDKARHITMHNLCIDGGATLGV

SEQ ID NO: 91774 - protein, 251 aa, Halomonas elongata
  REGION 1..251: note = tr|E1V3P3|E1V3P3_HALED 2,3-dihydro-2,3-dihydroxybenzoate dehydrogenase; OS = Halomonas elongata (strain ATCC 33173 / DSM 2581 / NBRC 15536 / NCIMB 2198 / 1H9) OX=768066GN=entA PE=4 SV=1
MEESRFRHKRVLVTGAASGIGRRIAERFHAEEAEVIGLDLCIEEQETPFRLLQLDISDAHQVATTCAQLQEECAELDVLVNAAGTLRLGDTESLTLDDWHSCLDVNASGVFYLMRQWIPQFKRQRSGAVINIASNAAHVPRMGMTAYCASKAALASLSHCVGLELAPYGVRCNLVSPGSTDTPMLRGMWQTPDDCKLTLQGLPERYKLGIPLGKLATPDDIATAVLFLASDQAGHITLQDLVIDGGATLGA

SEQ ID NO: 91775 - protein, 251 aa, Halomonas elongata; identical to SEQ ID NO: 91774
  REGION 1..251: note = tr|A0A1B8P1J5|A0A1B8P1J5_HALEL 2,3-dihydro-2,3-dihydroxybenzoate dehydrogenase; OS = Halomonas elongata OX=2746 GN=entA PE=4 SV=1

SEQ ID NO: 91776 - protein, 256 aa, Halomonas sp.
  REGION 1..256: note = tr|A0A4Y8W2V8|A0A4Y8W2V8_9GAMM 2,3-dihydro-2,3-dihydroxybenzoate dehydrogenase; OS = Halomonas sp. TBZ202 OX=2599398 GN=dhbA PE=4 SV=1
MRDRAVRYDDLTGKRVLVAGAGGGIGRCVAERFMDQGADVVGFDRNVDGRAVPFRLLAVDLGEHARVAEACARLQAESPHLDVLVNAAGILRLGRTEELSLDDWHACLDVNATGAFYLLRQWLPLFKQQRRGAVIHVASNAAHVPRIGMAAYCASKAALASLSHCVGLELAPYGVRCNLVSPGSTDTPMLHDMCPTPADRQRLLLGLAERYKLGIPLGKLATPGDIADAIVFLASERAGHITLQDLVIDGGATLGA

SEQ ID NO: 91777 - protein, 294 aa, unidentified
  source 1..294: note = Hathewaya histolytica
  REGION 1..294: note = tr|A0A4U9RF71|A0A4U9RF71_HATHI 2,3-dihydro-2,3-dihydroxybenzoate dehydrogenase; OS = Hathewaya histolytica OX=1498 GN=NCTC503_01330 PE=4 SV=1
MDKEEKNSLNKGTNEKNNLSNKAEKTKEDIIKHLHDMKDIDIFGAKSKYIERMENDLEEQKYIKEMQDMEDKLSRKNNYIVVGVVGLGLAIVVGLGIKIMQAPIKNFSFNDKAKVEKKSKEAQEKKEEEAVKGNKSKNNNSENLPEQNNKTYTYAVGNDNRKKSIEESIKINENNKSGITAIFIAELLRKAEVSVPKKVTNTKALVEDLTNKGWKKYTDPKQLKKGDVCFTTDMSNMEGYPSHVYIFMGWVKEGNTDEGYVCDSLVEENKDSLHKRTIGIETETKQKMAFFMRK

SEQ ID NO: 91778 - protein, 250 aa, unidentified
  source 1..250: note = Hydromonas sp.
  REGION 1..250: note = tr|A0A345DB67|A0A345DB67_9BURK 2,3-dihydro-2,3-dihydroxybenzoate dehydrogenase; OS = Hydromonas sp. F02 OX=2268024 GN=dhbA PE=4 SV=1
MDFSNQIAVVTGAAQGIGAAVVQRLLNDGAQVVLLDKTINPEDYVNVPQTHVFKVDVTNRMQVQEVIDAIEKEIGEVTMLVNVAGVLSLNRILDATEEEWECAFSVNVKGVFNVCQAIAQYMSTRRKGSIVTVASNASDTPRIGMGVYAASKAASTHLTHCLGLELAALGIRCNVVSPGSTDTPMQHQLWLTPEHKNAVLQGSLKQHRLGIPLGRIADADDVANAVCFLLSDQARHITMHDLRVDGGATV

SEQ ID NO: 91779 - protein, 261 aa, Iodobacter fluviatilis
  REGION 1..261: note = tr|A0A377STH0|A0A377STH0_9NEIS 2,3-dihydro-2,3-dihydroxybenzoate dehydrogenase; OS = Iodobacter fluviatilis OX=537 GN=dhbA PE=3 SV=1
MQDQLYRGKVAIVTGAAQGIGAAVVQALSRQGAIVAALDIQAERLQAVALQYRLEGLAVHAYSVDMRSSSRISEVVGQIEAELGPVAVLVNAAGILHMSAISTMSDEDWENTFAVNTHGPFYLSRAVAQCMIPRRSGAIVTVGSNAAEVPRLQMAAYAASKAAVGHFTKCLGLELAEYGIRCNIVSPGSTDTAMQRQLWQDESDVQKVIAGSLPGYRTGIPLGRIADAEDIAASVLFLLSPGARHITMHNLCVDGGATLGI

SEQ ID NO: 91780 - protein, 250 aa, unidentified
  source 1..250: note = Izhakiella sp.
  REGION 1..250: note = tr|A0A4P8YK61|A0A4P8YK61_9ENTR 2,3-dihydro-2,3-dihydroxybenzoate dehydrogenase; OS = Izhakiella sp. KSNA2 OX=2579935 GN=dhbA PE=4 SV=1
MKADFHGQTVWVTGAGRGIGYSTALAFHEAGARVVGFDRAFEQADYPFSTEQVDVADAAQVEQVCQRLLKDTDRLDVLVNAAGILRMGATDALPLNDWQDTFAVNVGGAFNFFRATMAQFRAQQGGALVTVASDAAHTPRIGMSAYGASKAALKSLALTVALELAEYGVRGNLVSPGSTDTDMQRGMWTTPDAEQKRIQGYPQQFKLGVPLGKIARPQEIADTILFLASKQASHITLQDIVVDGGSTLGA

SEQ ID NO: 91781 - protein, 258 aa, Janthinobacterium agaricidamnosum
  REGION 1..258: note = tr|W0V753|W0V753_9BURK 2,3-dihydro-2,3-dihydroxybenzoate dehydrogenase; OS = Janthinobacterium agaricidamnosum NBRC 102515 = DSM 9628 OX=1349767 GN=dhbA PE=4 SV=1
MEFQGKVVLISGAAQGIGAAVAQAMSLQGARLALFDVQPAALEQQAQALAGSGAPLLALAVDVADSAAVNAAVARVEQELGPVEVLVNAAGILRPGAALDCSDADWERTFSVNVGGVFRLCRAVASRMVPRRRGVIVTVASNASAVPRQQMAAYAASKAASAHFTRCLGLELAPHGIRCNVVSPGSTDTAMQRQLWTSDAHKQAIIDGSLQQFRLGIPLRRIADAADIADAVMFMASERARHITMHELCVDGGATLGA

SEQ ID NO: 91782 - protein, 264 aa, Janthinobacterium sp.
  REGION 1..264: note = tr|A0A0S4JZV4|A0A0S4JZV4_9BURK 2,3-dihydro-2,3-dihydroxybenzoate dehydrogenase of siderophore biosynthesis OS=Janthinobacterium sp. CG23_2; OX = 1706231 GN=BN3177_2785PE=4 SV=1
MNIFSPKQFEGKVALVTGGAQGIGAAVARKLAREGAAVAVLDVKAGVVEDMAATLRASGINAIGIAVDVADSRAVNEAVARVRRELGEIDVLINVAGILRMGSILDYSDADWEQTFAVNAGGVFRLCRAVAPGMVERKRGAIVTVASNASTVPRMQMGAYAASKAASTQFMRCLGLELAQYGIRCNVVSPGSTDTEMQRQLWNGVDGSQAVIGGSLETFRLGIPLKRIATPDDIADTVLYLASDSARHITMHDLRIDGGATLGA

SEQ ID NO: 91783 - protein, 252 aa, unidentified
  source 1..252: note = Kalamiella piersonii
  REGION 1..252: note = tr|A0A3A9IDE8|A0A3A9IDE8_9GAMM 2,3-dihydro-2,3-dihydroxybenzoate dehydrogenase; OS = Kalamiella piersonii OX=2364647 GN=dhbA PE=4 SV=1
MSQHFDFSGKIVWVTGAGQGIGYHTALAFHAAGAQVQGFDLRFHDHDYPFACHRLDVADPEQVKATCQPLLAQQPRLDVLVNGAGILRIGATDEISFEDFQACLAVNVGGAFNMFQQTLPLFRQQRAGAIVTIASNSAHAPRIGMSAYGASKAALRSLALTVGLEMAPYGVRCNIVSPGSTDTEMQRSLWHTPTAEQEMIDGFPDQYKLGIPLRKIARPQEIAHNVLFLASDLASHVVLQDIVVDGGATLGA

SEQ ID NO: 91784 - protein, 258 aa, unidentified
  source 1..258: note = Ketobacter sp.
  REGION 1..258: note = tr|A0A3L8BKQ4|A0A3L8BKQ4_9GAMM 2,3-dihydro-2,3-dihydroxybenzoate dehydrogenase; OS = Ketobacter sp. OX=2083498 GN=D9N14_12430 PE=4 SV=1
MESKTQVVMISGAARGIGAAVARTFAALGHPLALLDCQPDVTELARELAATYSVKTLGLILDVSDRSAVEQAVTRVEDQLGELHTLVNVAGILRLVPLLEMAAEDWDRTLAVNSTGVFNLSTSVARRLVTRRRGCIITVGSNAATTARTQMGAYAASKAASHQFTRCLGLELAPYGIRCNIVSPGSTDTDMQRQLWTSDEVPAGVLQGSPEQFRLGIPLQRIASPEDIANAVRFLASDEARHITLHDLRVDGGATLDA

SEQ ID NO: 91785 - protein, 262 aa, Kibdelosporangium sp.
  REGION 1..262: note = tr|A0A0K3BQU8|A0A0K3BQU8_9PSEU 2,3-dihydro-2,3-dihydroxybenzoate dehydrogenase of siderophore biosynthesis OS=Kibdelosporangium sp. MJ126-NF4 OX=703222 PE=4 SV=1
MTELSGIESTVALVTGAAQGIGAAVAATLSDARAHVALVDRNAEALDTIVDKLTAGSGSVRGYTVDVCDSDAVNTLVQNIEDEQGPIGILVNSAGVLRTGKVVELPDRYWSEMFSVNVDGVFNVSRAVALRMISRRRGAIVTVASNAAGVPRMEMAAYAASKAASAQFTRCLGLELAEHGIRCNVVSPGSTDTPMLRAMLGEHVDPRVAIDGSPAAYRVGIPLRKLAQPRDVAEAVAFLVSDQAGHITMHDLYVDGGAALHV

SEQ ID NO: 91786 - protein, 248 aa, unidentified
  source 1..248: note = Kitasatospora xanthocidica
  REGION 1..248: note = tr|A0A373A5M9|A0A373A5M9_9ACTN 2,3-dihydro-2,3-dihydroxybenzoate dehydrogenase; OS = Kitasatospora xanthocidica OX=83382 GN=DR950_35520 PE=4; SV = 1
MVTGAGQGIGAAVVRALVAEGAVVAAVDRDPGGIDALAAELPSVRPYALDVSDARAVDSTVESIESRLGPIGVLVNVAGILRTAPVVELTDGDWADTFAVNTTGVFHTSRAVGRRMADRGRGAVVTVGSNAAGVPRAGMAAYAASKAAATMFTRCLGLELARSGVRCNVVSPGSTDTAMQRALWGEDAEAAERRVIEGDLGAWRVGIPLGRIAAPADIAEAVVFLASDRARHITMHDLYVDGGATLRA

SEQ ID NO: 91787 - protein, 251 aa, unidentified
  source 1..251: note = Klebsiella aerogenes
  REGION 1..251: note = tr|A0A0H3FXS4|A0A0H3FXS4_KLEAK 2,3-dihydroxybenzoate-2,3-dehydrogenase OS=Klebsiella aerogenes (strain ATCC 13048 / DSM 30053 / JCM 1235 / KCTC 2190 / NBRC 13534 / N CIMB 10102 / NCTC 10006) OX=1028307; GN = EAE_13665
MAALDFHGQTVWVTGAGKGIGYATALAFVEAGANVTGFDLAFDGEGYPFATEMLDVADADQVRDVCARLLNDIERLDVLVNAAGILRMGATDQLSAEDWQQTFAVNVGGAFNLFQQTMAQFRRQRGGAIVTVASDAAHTPRIGMSAYGASKAALKSLALTVGLELAGSGVRCNLVSPGSTDTDMQRTLWVNEDAEQQRIRGFGEQFKLGIPLGKIARPQEIANTILFLASSHASHITLQDIVVDGGSTLGA

SEQ ID NO: 91788 - protein, 251 aa, unidentified; identical to SEQ ID NO: 91787
  source 1..251: note = Klebsiella aerogenes
  REGION 1..251: note = tr|A0A0F0U6G4|A0A0F0U6G4_KLEAE 2,3-dihydro-2,3-dihydroxybenzoate dehydrogenase; OS = Klebsiella aerogenes OX=548 GN=entA PE=4 SV=1

SEQ ID NO: 91789 - protein, 251 aa, unidentified
  source 1..251: note = Klebsiella grimontii
  REGION 1..251: note = tr|A0A5A8Y1B0|A0A5A8Y1B0_9ENTR 2,3-dihydro-2,3-dihydroxybenzoate dehydrogenase; OS = Klebsiella grimontii OX=2058152 GN=dhbA PE=4 SV=1
MNGLDFHGQTVWITGAGKGIGYATALAFVEAGAQVTGFDLAFDGESYPFATETLDVADARQVAQVCGRLLAGIERLDVLVNAAGILRMGATDALSQEDWQQTFAVNVGGAFNLFQQTMAQFRRQKGGAIVTVASDAAHTPRIGMSAYGASKAALKSLALTVGLELAGSGVRCNLVSPGSTDTDMQRTLWVSDDAEQQRIRGFGEQFKLGIPLGKIARPQEIANTILFLASAHASHITLQDIVVDGGSTLGA

SEQ ID NO: 91790 - protein, 251 aa, unidentified
  source 1..251: note = Klebsiella michiganensis
  REGION 1..251: note = tr|A0A2J4Z6L6|A0A2J4Z6L6_9ENTR 2,3-dihydro-2,3-dihydroxybenzoate dehydrogenase; OS = Klebsiella michiganensis OX=1134687 GN=dhbA PE=4 SV=1
MNGLDFHGRTVWITGAGKGIGYATALAFVEAGAQVTGFDLAFDGESYPFATETLDVADAQQVAQTCGRLLAGIARLDVLVNAAGILRMGATDALSQEDWQQTFAVNVGGAFNLFQQTMGQFRRQKGGAIVTVASDAAHTPRIGMSAYGASKAALKSLALTVGLELAGSGVRCNLVSPGSTDTDMQRTLWVSDDAEQQRIRGFGEQFKLGIPLGKIARPQEIANTILFLASDHASHITLQDIVVDGGSTLGA

SEQ ID NO: 91791 - protein, 251 aa, Klebsiella oxytoca; identical to SEQ ID NO: 91790
  REGION 1..251: note = tr|A0A0H3HAF2|A0A0H3HAF2_KLEOK 2,3-dihydroxybenzoate-2,3-dehydrogenase OS=Klebsiella oxytoca (strain ATCC 8724 / DSM 4798 / JCM 20051 / NBRC 3318 / NRRL B-199 / KCTC1686) OX=1006551 GN=KOX_13965 PE=4; SV = 1

SEQ ID NO: 91792 - protein, 261 aa, Klebsiella oxytoca
  REGION 1..261: note = tr|A0A077MKN5|A0A077MKN5_KLEOX 2,3-dihydro-2,3-dihydroxybenzoate dehydrogenase; OS = Klebsiella oxytoca OX=571 GN=dhbX PE=3 SV=1
MTFDKDYIAVITGACGGIGESVAHALAKEGLSLALLDNNATQLATLVATLQDNHPQPIAGFTVDVADDRCVAEAFTAVGHQLGPVGYLVNGAGVLCHASVAETQPQDWAKTFAVNATGVFNTSRHAANLMMAQRKGSIVTIASNAARVPRATMAAYCASKAAAQAFTYALGLEVAPYGIRCNVVAPGSTDTPMLRGMWHSESDKQNTLNGNPQQFRIGIPLNKVATAEEIAAAVCFYLCEESGQTTLSTLLVDGGAALGSC

SEQ ID NO: 91793 - protein, 144 aa, Klebsiella pneumoniae
  REGION 1..144: note = tr|W1EP87|W1EP87_KLEPN 2,3-dihydro-2,3-dihydroxybenzoate dehydrogenase [enterobactin] siderophore OS=Klebsiella pneumoniae IS53; OX = 1432554 PE=4 SV=1
MTLADIDALINVNIRGVVIATQEALVHMADGGRIINIGSCLANRVAMPGIAVYAMTKSALNALTRGLARDLGPRGITVNLVHPGPTNSDMNPEDGEQAEAQRQMIAVGHYGQPEDIAAAVTFLASPAAGQISGTGLDVDGGLNA

SEQ ID NO: 91794 - protein, 108 aa, Klebsiella pneumoniae
  REGION 1..108: note = tr|A0A2X3EP62|A0A2X3EP62_KLEPN 2,3-dihydroxybenzoate-2,3-dehydrogenase OS=Klebsiella pneumoniae OX=573 GN=entA_2 PE=4 SV=1
MSAYGASKAALKSLALTVGLELAGSGVRCNLVSPGSTDTDMQRTLWVSDDAEQQRIRGFGEQFKLGIPLGKIARPQEIANTILFLASSHASHITLQDIVVDGGSTLGA

SEQ ID NO: 91795 - protein, 263 aa, Klebsiella pneumoniae
  REGION 1..263: note = tr|A0A377Z8W7|A0A377Z8W7_KLEPO 2,3-dihydroxybenzoate-2,3-dehydrogenase OS=Klebsiella pneumoniae subsp. ozaenae OX=574 GN=entA PE=4 SV=1
MAALDFRGQTVWVTGAGKGIGYATALAFVEAGANVTGFDLAFDGESYPFATETLDVADADQVREACSRLLANTERLDVLVNAAGILRMGATDQLSAEDWQQTFAVNVGGAFNLFQQTMAQFRRQRGGAIVTVASDAAHTPRIGMSAYGASKAALKSLALTVGLELAGSGVRCNLVSPGSTDTDMQRTLWVSDDAEQQRIRGFGEQFKLGIPLGKIARPQEIANTILFLASSHASHITLQDIVVDGGSTLGRKWPGSESLRWRR

SEQ ID NO: 91796 - protein, 251 aa, Klebsiella pneumoniae
  REGION 1..251: note = tr|A0A378A640|A0A378A640_KLEPN 2,3-dihydro-2,3-dihydroxybenzoate dehydrogenase; OS = Klebsiella pneumoniae subsp. pneumoniae OX=72407; GN = entA PE=4 SV=1
MAALDFRGQTVWVTGAGKGIGYATALAFVEAGANVTGFDLAFDGESYPFATETLDVADADQVREACSRLLANTERLDVLVNAAGILRMGATDQLSAEDWQQTFAVNVGGAFNLFQQTMAQFRRQRGGAIVTVASDAAHTPRIGMSAYGASKAALKSLALTVGLELAGSGVRCNLVSPGSTDTDMQRTLWVSDDAEQQRIRGFGEQFKLGIPLGKIARPQEIANTILFLASSHASHITLQDIVVDGGSTLGA

SEQ ID NO: 91797 - protein, 251 aa, unidentified
  source 1..251: note = Klebsiella quasipneumoniae
  REGION 1..251: note = tr|A0A483KIP3|A0A483KIP3_9ENTR 2,3-dihydro-2,3-dihydroxybenzoate dehydrogenase; OS = Klebsiella quasipneumoniae OX=1463165 GN=dhbA PE=4 SV=1
MAALDFRGQTVWVTGAGKGIGYATALAFVEAGANVTGFDLAFDGERYPFATETLDVADADRVREVCSRLLANTERLDVLVNAAGILRMGATDQLSAEDWQQTFAVNVGGAFNLFQQTMAQFRRQRGGAIVTVASDAAHTPRIGMSAYGASKAALKSLALTVGLELAGSGVRCNLVSPGSTDTDMQRTLWVSDDAEQQRIRGFGEQFKLGIPLGKIARPQEIANTILFLASAHASHITLQDIVVDGGSTLGA

SEQ ID NO: 91798 - protein, 251 aa, unidentified; identical to SEQ ID NO: 91797
  source 1..251: note = Klebsiella quasipneumoniae
  REGION 1..251: note = tr|A0A422X791|A0A422X791_9ENTR 2,3-dihydro-2,3-dihydroxybenzoate dehydrogenase; OS = Klebsiella quasipneumoniae subsp. quasipneumoniae; OX = 1667327 GN=dhbA PE=4 SV=1

SEQ ID NO: 91799 - protein, 251 aa, unidentified
  source 1..251: note = Klebsiella quasipneumoniae
  REGION 1..251: note = tr|A0A5C6INC4|A0A5C6INC4_9ENTR 2,3-dihydro-2,3-dihydroxybenzoate dehydrogenase; OS = Klebsiella quasipneumoniae subsp. similipneumoniae; OX = 1463164 GN=dhbA PE=4 SV=1
MAALDFRGQTVWVTGAGKGIGYATALAFVEAGANVTGFDLAFDGERYPFATETLDVADADRVREVCRRLLANTERLDVLVNAAGILRMGATDQLSAEEWRQTFAVNVGGAFNLFQQTMAQFRRQRGGAIVTVASDAAHTPRIGMSAYGASKAALKSLALTVGLELAGSGVRCNLVSPGSTDTDMQRTLWVSDDAEQQRIRGFGEQFKLGIPLGKIARPQEIANTILFLASSHASHITLQDIVVDGGSTLGA

SEQ ID NO: 91800 - protein, 251 aa, unidentified
  source 1..251: note = Klebsiella quasivariicola
  REGION 1..251: note = tr|A0A556VH78|A0A556VH78_9ENTR 2,3-dihydro-2,3-dihydroxybenzoate dehydrogenase; OS = Klebsiella quasivariicola OX=2026240 GN=dhbA PE=4 SV=1
MAALDFRGQTVWVTGAGKGIGYATALAFVEAGANVTGFDLAFSGESYPFATETLDVADADQVRDVCARLLNNIERLDVLVNAAGILRMGATDQLSAEDWRQTFAVNVGGAFNLFQQTMAQFRRQRGGAIVTVASDAAHTPRIGMSAYGASKAALKSLALTVGLELAGSGVRCNLVSPGSTDTDMQRTLWVNDDAEQQRIRGFGEQFKLGIPLGKIARPQEIANTILFLASSHASHITLQDIVVDGGSTLGA

SEQ ID NO: 91801 - protein, 251 aa, Klebsiella sp.
  REGION 1..251: note = tr|J5XDN7|J5XDN7_9ENTR 2,3-dihydro-2,3-dihydroxybenzoate dehydrogenase; OS = Klebsiella sp. OBRC7 OX=936565 GN=HMPREF1144_3921 PE=4; SV = 1
MNGLNFHGRTVWITGAGKGIGYATALAFVEAGAQVTGFDLAFDGESYPFATETLDVADAQQVAQTCGRLLAGIARLDVLVNAAGILRMGATDALSQEDWQQTFAVNVGGAFNLFQQTMAQFRRQKGGAIVTVASDAAHTPRIGMSAYGASKAALKSLALTVGLELAGSGVRCNLVSPGSTDTDMQRTLWVSDDAEQQRIRGFGEQFKLGIPLGKIARPQEIANTILFLASDHASHITLQDIVVDGGSTLGA

SEQ ID NO: 91802 - protein, 251 aa, Klebsiella sp.
  REGION 1..251: note = tr|A0A3G5D7A3|A0A3G5D7A3_9ENTR 2,3-dihydro-2,3-dihydroxybenzoate dehydrogenase; OS = Klebsiella sp. P1CD1 OX=2267618 GN=dhbA PE=4 SV=1
MAALDFHGQTVWVTGAGKGIGYATALAFVEAGANVTGFDLAFDGEGYPFATETLDVADAGQVRDVCARLLNNIERLDVLVNAAGILRMGATDQLSAEDWQQTFAVNVGGAFNLFQQTMAQFRRQRGGAIVTVASDAAHTPRIGMSAYGASKAALKSLALTVGLELAGSGVRCNLVSPGSTDTDMQRTLWVSDDAEQQRIRGFGEQFKLGIPLGKIARPQEIANTILFLASSHASHITLQDIVVDGGSTLGA

SEQ ID NO: 91803 - protein, 251 aa, Klebsiella sp.
  REGION 1..251: note = tr|A0A0L0AR76|A0A0L0AR76_9ENTR 2,3-dihydroxybenzoate-2,3-dehydrogenase OS=Klebsiella sp. RIT-PI-d OX=1681196 GN=AC791_08135 PE=4 SV=1
MSGFDFHGKTVWVTGAGKGIGFATAQAFSGAGAKVIGFDLAFDRRDYAFTTEILDVANAVQVADVCQRVLASDARLDVLVNAAGILRMGATDALSAEEWQQTFAVNVGGAFNLFQQTMPQFRRQQSGAIVTVASDAAHTPRIGMSAYGASKAALKSLALTVGLELAASGVRCNLVSPGSTDTDMQRTLWVSDDAEQQRIRGFAEQFKLGIPLGKIARPQDIANTILFLASDLACHVTLQDIVVDGGSTLGA

SEQ ID NO: 91804 - protein, 251 aa, Klebsiella sp.
  REGION 1..251: note = tr|A0A4S5DKK9|A0A4S5DKK9_9ENTR 2,3-dihydro-2,3-dihydroxybenzoate dehydrogenase; OS = Klebsiella sp. Z2 OX=2561928 GN=dhbA PE=4 SV=1
MMAFDFTGKTVWVTGAGKGIGYATALAFVEAGAQVTGFDLAFPHGEYPFATETLDVADAAQASDVCGHLLSSLERLDVLVNAAGILRMGATDQLSPEDWQQTFAVNVGGAFNLFQQTMGQFRRQQGGAIVTVASDAAHTPRIGMSAYGASKAALKSLALTVGLELAGSGVRCNLVSPGSTDTDMQRTLWTSDDAEQRRIRGFGEQFKLGIPLGKIARPQEIAATVLFLASDAASHITLQDIVVDGGSTLGA

SEQ ID NO: 91805 - protein, 251 aa, Klebsiella variicola
  REGION 1..251: note = tr|A0A4S4HUE3|A0A4S4HUE3_KLEVA 2,3-dihydro-2,3-dihydroxybenzoate dehydrogenase; OS = Klebsiella variicola OX=244366 GN=dhbA PE=4 SV=1
MAALDFNGQTVWVTGAGKGIGYATALAFVEAGANVTGFDLAFAGAGYPFATETLDVADAGQVRDVCARLLNNIERLDVLVNAAGILRMGATDQLSAEDWQQTFAVNVGGAFNLFQQTMAQFRRQRGGAIVTVASDAAHTPRIGMSAYGASKAALKSLALTVGLELAGSGVRCNLVSPGSTDTDMQRTLWVSDDAEQQRIRGFGEQFKLGIPLGKIARPQEIANTILFLASSHASHITLQDIVVDGGSTLGA

SEQ ID NO: 91806 - protein, 251 aa, Kluyvera ascorbata
  REGION 1..251: note = tr|A0A378GM70|A0A378GM70_9ENTR 2,3-dihydro-2,3-dihydroxybenzoate dehydrogenase; OS = Kluyvera ascorbata OX=51288 GN=entA PE=4 SV=1
MAGFDFNGQTVWVTGAGKGIGHATALAFVDAGAKVTGFDLAFNGEHYPFATEVLNVADAQQVAQVCERLLATTERLDVLVNAAGILRMGATDALSLDDWQQTFAVNVGGAFNLFQQTMAQFRRQQGGAIVTVASDAAHTPRIGMSAYGASKAALKSLALTVGLELSSAGVRCNIVSPGSTDTDMQRVLWVSDDAEQQRIRGFGEQFKLGIPLGKIARPQEIANTILFLASNCASHITLQDIVVDGGSTLGA

SEQ ID NO: 91807 - protein, 251 aa, Kluyvera cryocrescens
  REGION 1..251: note = tr|A0A2X3EC21|A0A2X3EC21_KLUCR 2,3-dihydro-2,3-dihydroxybenzoate dehydrogenase; OS = Kluyvera cryocrescens OX=580 GN=entA PE=4 SV=1
MAGLDFNGQTVWVTGAGKGIGHATALAFVEAGATVTGFDLAFDGEDYPFATEVLDVADAQQVAQVCERVLAKTERLDVLVNAAGILRMGATDTLSLADWQQTFAVNVGGAFNLFQQTMAQFRRQQGGAIVTVASDAAHTPRMGMSAYGASKAALKSLALTVGLELAGAGVRCNIVSPGSTDTDMQRVLWVSDDAEQQRIRGFAEQFKLGIPLGKIARPHEIANTILFLASSSASHITLQDIVVDGGSTLGA

SEQ ID NO: 91808 - protein, 251 aa, Kluyvera georgiana
  REGION 1..251: note = tr|A0A1B7JGE2|A0A1B7JGE2_9ENTR 2,3-dihydro-2,3-dihydroxybenzoate dehydrogenase; OS = Kluyvera georgiana ATCC 51603 OX=1354264 GN=M989_03976; PE = 4 SV=1
MTGFDFRGQTVWVTGAGKGIGYSTALAFVAAGAQVTGFDLAFDGEDYPFATEVLDVADAQQVAQVCERLLAGAERLDVLVNAAGILRMGATDALSQADWQQTFAVNVGGAFNLFQNTMAQFRRQKGGAIVTVASDAAHTPRIGMSAYGASKAALKSLALTVGLELASAGVRCNIVSPGSTDTDMQRVLWVSDDAEQQRIRGFAEQFKLGIPLGKIAHPQEIASTILFLASHSASHITLQDIVVDGGSTLGA

SEQ ID NO: 91809 - protein, 251 aa, Kluyvera intermedia
  REGION 1..251: note = tr|A0A3S4EE40|A0A3S4EE40_KLUIN 2,3-dihydro-2,3-dihydroxybenzoate dehydrogenase; OS = Kluyvera intermedia OX=61648 GN=entA PE=4 SV=1
MAGFDFSGQTVWVTGAGKGIGYSTALAFVEAGAKVTGFDLAFGGEDYPFATEVVDVADAQQVAQVCERLLAKTERLDVLVNAAGILRMGATDALSQADWQQTFAVNVGGAFNLFQQTMAQFRRQQGGAIVTVASDAAHTPRIGMSAYGASKAALKSLALTVGLELASYGVRCNIVSPGSTDTDMQRVLWVSDDAEQQRIRGFAEQFKLGIPLGKIARPQEIANTILFLASDCASHITLQDIVVDGGSTLGA

SEQ ID NO: 91810 - protein, 235 aa, Kocuria rosea
  REGION 1..235: note = tr|A0A3P8JZA8|A0A3P8JZA8_KOCRO 2,3-dihydro-2,3-dihydroxybenzoate dehydrogenase OS=Kocuria rosea OX=1275 GN=dhbA_2 PE=4 SV=1
MSTSSGARTAVVAGATSASGVALTHALLACGYTVVAVGSSAGRLETALAGLDGVDRRVCDLTDEAAVSSLAARLQADHGGVDALFHLVGGWRGGTGITTQTTEDYDALHRSVFTTLFNTSRAFYDQLAARGGRLAAVSATAVASPTAPNASYAAVKASVDAWLQAVAHGFSKDGTAAAATAVVVKALLDDRMRAEHPERTFPGYTHVADLARILVSLPGRPPAEINGARIDAVRG

SEQ ID NO: 91811 - protein, 313 aa, unidentified
  source 1..313: note = Komagataeibacter europaeus
  REGION 1..313: note = tr|A0A0M0EK27|A0A0M0EK27_KOMEU 2,3-dihydro-2,3-dihydroxybenzoate dehydrogenase; OS = Komagataeibacter europaeus OX=33995 GN=entA1 PE=4 SV=1
MTRHWTIKQAPRMDGHLALVTGATGGLGYQTALGLASRGARVMLAGRNPDKGLAALTRLQHDAPGADATFRLLDVASLDSIATFARELAAETDRLDILVNNAGVMGTPRRLETRDGFELQFGTNFLGPFALTARLRPLLCAAPQGGRVVTVASLAALTGQIVFDDLQGRRRYAPFRAYRQSKLADLILALELDRQARTHGWPLHSIAAHPGWAMTDIAASRLNTKQGLQERLTRFGAIWAFRLMGQSAAHGALPIEFAAMAPEARDGGYYGPGGRGERRGHVAEAFIPPAARDLTIARRLWQVAERLTGTSLS

SEQ ID NO: 91812 - protein, 304 aa, unidentified
  source 1..304: note = Komagataeibacter saccharivorans
  REGION 1..304: note = tr|A0A347W8C3|A0A347W8C3_9PROT 2,3-dihydro-2,3-dihydroxybenzoate dehydrogenase; OS = Komagataeibacter saccharivorans OX=265959 GN=entA PE=4; SV = 1
MRKWTTSDIPDIRGRSFVVTGTGGLGFEDALALAGAGATVILAGRNPAKGSGAVARIKREAPKADISFEALDLADLASIAAFGERLRSQRDHLDVLINNAGVMMPPTRKVTSDGFELQFGTNYLGHFALTAHLLPLLRKGDHPRVVTLSSIAARDGRIAFDDLQATRNYKPMPVYSQSKLACLMFALELQRRSEAGNWGITSIAAHPGISRTDLLPNGAGASSILGLARRILWFLFQPAAQGALPTLFAATSSEAKGGCYYGPDKLSETRGYPTAAKIPPVALDRQDAARLWDISEQLTHVQFG

SEQ ID NO: 91813 - protein, 200 aa, Kordia sp.
  REGION 1..200: note = tr|A0A345H140|A0A345H140_9FLAO 2,3-dihydro-2,3-dihydroxybenzoate dehydrogenase OS=Kordia sp. SMS9 OX=2282170 GN=entA PE=4 SV=1
MKILIIGGNGTIGKKLTEYFRQQHEVFIAGRTTGDVTVDISNSQSIQKMFDQVGTLDAIICAAGEATWKPFDELSEEDYYVGFKSKLMGQVNLVRIGQNYLNKGGSITLTTGILADEPVPMTASAAMVNGAIHSFVKAVILELEGNIRVNVVSSGLVEDAVEKYDAYFPGHNPIAMQKVVNAYRKSVDGRQTGEIIRIYN

SEQ ID NO: 91814 - protein, 251 aa, unidentified
  source 1..251: note = Kosakonia cowanii
  REGION 1..251: note = tr|A0A410KFX3|A0A410KFX3_9ENTR 2,3-dihydro-2,3-dihydroxybenzoate dehydrogenase; OS = Kosakonia cowanii OX=208223 GN=dhbA PE=4 SV=1
MASLDFSGRSVWVSGAGKGIGYATALAFVEAGAQVTGFDLAFNGVHYPFACETLDIADAAQVAAVSERLLANNAPLDVLVNAAGILHMGATDALSDKEWQQTFTVNVGGAFNLFRQTMAHFRRQQRGAIVTVCSDAAHTPRIGMSAYGASKAALKSLALTVGLELAASHVRCNIVSPGSTDTDMQRTLWVSDDAEQQRIRGFGEQFKLGIPLGKIARPQEVANTILFLASDLASHITLQDIVVDGGSTLGA

SEQ ID NO: 91815 - protein, 251 aa, unidentified
  source 1..251: note = Kosakonia radicincitans
  REGION 1..251: note = tr|A0A5C1PDB1|A0A5C1PDB1_9ENTR 2,3-dihydro-2,3-dihydroxybenzoate dehydrogenase; OS = Kosakonia radicincitans OX=283686 GN=dhbA PE=4 SV=1
MASLDFTGKIVWVTGAGKGIGYATALAFVAAGAQVTGFDLAFPGRDYPFSCETVDIADAAQAQAACKRLLAQNDRLDVLVNAAGILHMGATDALSAEAWQRTFAVNVGGAFNLFQQTMAQFRRQQGGAIVTVASDAAHTPRIGMSAYGASKAALKSLTLTVGLELAASRVRCNVVSPGSTDTDMQRTLWVSDDAEQQRIRGFGEQFKLGIPLGKIARPQEVANTVLFLASDLASHITLQDIVVDGGSTLGA

SEQ ID NO: 91816 - protein, 251 aa, unidentified
  source 1..251: note = Kosakonia sp.
  REGION 1..251: note = tr|A0A3G9BN52|A0A3G9BN52_9ENTR 2,3-dihydro-2,3-dihydroxybenzoate dehydrogenase; OS = Kosakonia sp. CCTCC M2018092 OX=2492396 GN=dhbA PE=4; SV = 1
MASLDFSGRSVWVSGAGKGIGYATALAFVEAGAQVTGFDLAFNGEHYPFACETLDIADAAQVAAVCERLLSNNAPLDVLVNAAGVLHMGATDALSDKEWQQTFAVNVGGAFNLFRQTMAHFRRQQRGAIVTVCSDAAHTPRIGMSAYGASKAALKSLALTVGLELAASHVRCNIVSPGSTDTDMQRTLWVSDDAEQQRIRGFGEQFKLGIPLGKIARPQEVANTILFLASDLASHITLQDIVVDGGSTLGA

SEQ ID NO: 91817 - protein, 251 aa, unidentified
  source 1..251: note = Kosakonia sp.
  REGION 1..251: note = tr|A0A4R0HV40|A0A4R0HV40_9ENTR 2,3-dihydro-2,3-dihydroxybenzoate dehydrogenase; OS = Kosakonia sp. WCHEs120001 OX=2529380 GN=dhbA PE=4 SV=1
MASLDFTGNIVWVTGAGKGIGYATAKAFVEAGAHVTGFDLAFGGTDYPFSCEVLDVADAGQVQAVCQRLLMQSERLDVLVNAAGVLHMAATDELTAQAWQNTFAVNVGGAFNLFQQTMAQFRRQQSGAIVTVASDAAHTPRIGMSAYGASKAALKSLALSVGLELAASRVRCNIVSPGSTDTDMQRLLWLSDDAEQQRIRGFGEQFKLGIPLGKIARPQEVANTILFLASDLASHITLQDIVVDGGSTLGA

SEQ ID NO: 91818 - protein, 262 aa, unidentified
  source 1..262: note = Kushneria phyllosphaerae
  REGION 1..262: note = tr|A0A2R8CJR0|A0A2R8CJR0_9GAMM 2,3-dihydro-2,3-dihydroxybenzoate dehydrogenase; OS = Kushneria phyllosphaerae OX=2100822 GN=dhbA PE=4 SV=1
MSGEFQDDHIVITGAARGIGATLAQDLLEQGASVALLDSLEDTLNDTATRLGEAFGSERVSTYVVDVSDSTAVDKAIAEIEAHAPITHLAHVAGVLQMGRVTELTDAQWLHALNINTTGVFNVTRAVARRMSERQKGAIVVVGSNAADTPRQAMGAYCASKAATHQLVRCLGLEMAEHNVRCNIVSPGSTDTDMQRGMWIDDSGRDNVIRGSLEGWKLGIPLRRIAEPGDVSEAIRFLLSDRARHITLHDMRIDGGATLGIR

SEQ ID NO: 91819 - protein, 251 aa, Labrenzia aggregata
  REGION 1..251: note = tr|A0A0M6YAX8|A0A0M6YAX8_9RHOB 2,3-dihydro-2,3-dihydroxybenzoate dehydrogenase; OS = Labrenzia aggregata OX=187304 GN=entA PE=4 SV=1
MSTRQFADKRVFVTGAASGIGRRIAERFCDEGATVLGLDRQAGDNTLPFRILTADLADARQVEKISSGLVADRWYPDILVNAAGVLRTGAAEDLSLEDWQACMNVNVSGPFYLLRQWIPVFKERQSGAIVNIASNAAHVPRTGMTAYCASKAAMASLSHCIGLELAPFGIRCNLVSPGSTDTPMLREMTGGASGYRQLVAGQPDRFKLGIPLQKVATTDDIAETVLFLASDKAGHITLQDIVVDGGATLGA

SEQ ID NO: 91820 - protein, 255 aa, Labrys neptuniae
  REGION 1..255: note = tr|A0A5C1W9T4|A0A5C1W9T4_9RHIZ 2,3-dihydro-2,3-dihydroxybenzoate dehydrogenase OS=Labrys neptuniae OX=376174 GN=dhbA PE=4 SV=1
MTSWNFAGKRVLVTGAAGGIGRCVAERFRAEGARVVGLDLAAPNAGGNGNAEAELIALDITDPRQVDEVCGRILGESECLDILVNAAGVLRLGAAEDLTLDDWQACFGVNVSGAFYLMRRCIPLFKRQRSGVIVNVASNAAHVPRVGMTAYCASKAAMVSLSHCVGLELAPFGVRCNVVSPGSTDTPMLRGMFKNPSDGQRLLAGLPEHFKLGIPLGKLASPEEIADVVLFLASDRSSHVTLQDVVVDGGATLGA

SEQ ID NO: 91821 - protein, 255 aa, unidentified
  source 1..255: note = Lampropedia puyangensis
  REGION 1..255: note = tr|A0A4S8F3R3|A0A4S8F3R3_9BURK 2,3-dihydro-2,3-dihydroxybenzoate dehydrogenase; OS = Lampropedia puyangensis OX=1330072 GN=E9531_08405 PE=4; SV = 1
MQLTGFNNRIALVTGAGGGIGQAVTDALLAAGSTVVACDLTAPSQPNHHHDHFHARALDVRNSVAVNNLVADVEAHIGPIDLGVNVAGVLSNTLVTETSDDAWRQVFAVNCDGVFHVSRALAQRMQARQRGVMVTVSSNAAGVPRHAMAAYAASKAAATMFTRCLGLELAPHGIRCNIVAPGSTLTPMQTGMWADDRGAERVIAGLPEQYKAGIPLRKLATPEDIAHAVLFMLSEQAGHIAMSDLYVDGGATLRA

SEQ ID NO: 91822 - protein, 258 aa, Lampropedia sp.
  REGION 1..258: note = tr|A0A4S5BVI4|A0A4S5BVI4_9BURK 2,3-dihydro-2,3-dihydroxybenzoate dehydrogenase; OS = Lampropedia sp. YIM MLB12 OX=2562762 GN=E8K88_01130; PE = 4 SV=1
MQLTGFQDRVAFVTGAERGIGLAVASTLLEAGCIVVASDVRLPQLPAALRDKHSRFHAHVLDVRDANAVNALVDLVEERIGPIDLGANVAGVLCNTVVTETSDEAWRQVFAVNCDGVFHVCRALAQRMQPRQRGAMVTVSSNAAGVARHAMAAYAASKAAATMFTRCLGLELAPHGIRCNIVAPGSTLTPMQTGMWSDAHGAERVIAGLPEQYKAGIPLRKLATPEDIAHAVMFMLSEQAGHIAMSDLYVDGGATLRA

SEQ ID NO: 91823 - protein, 274 aa, Lautropia sp.
  REGION 1..274: note = tr|A0A3R8NSA8|A0A3R8NSA8_9BURK 2,3-dihydro-2,3-dihydroxybenzoate dehydrogenase; OS = Lautropia sp. KCOM 2505 OX=2490857 GN=dhbA PE=4 SV=1
MNSTSTRRFSGKRVLATGTAQGIGRRIAERFVGEGAEVIGLDRQAPTGSQPGTGGAHESSASPSASASAAALTQLQVDLTDTAAIARVCAQIRQRWDSLDVLVNAAGVLRMGGLDTLSADDWQACLDVNVTGPFHLIQQWAQVLKAQRRGAIVNIASNAAVVPRIGMLAYCTSKAAMAAMSQTVALEMAPFGVRCNIVSPGSTNTPMLAGMLGDPAGQKRLIEGLPEDYKLGIPLGKIATPDDIADAVLFLASDQAGHITMQQIVIDGGATLGA

SEQ ID NO: 91824 - protein, 248 aa, Leclercia adecarboxylata
  REGION 1..248: note = tr|A0A514VJ40|A0A514VJ40_9ENTR 2,3-dihydro-2,3-dihydroxybenzoate dehydrogenase; OS = Leclercia adecarboxylata OX=83655 GN=dhbA PE=4 SV=1
MDFTGKTVWVTGAGKGIGYATARAFAEAGAKVTGFDVAFPQASYPFATEVLNVADAVQVNEVCGRLLATIDRLDVLVNAAGILRMGATDQLSQDHWQETFAVNVGGAFNLFQQTMGQFRRQQGGAIVTVASDAAHTPRIGMSAYGASKAALKSLALTVGLELAGSGVRCNLVSPGSTDTDMQRTLWVSDDAEQQRIRGFGEQFKLGIPLGKIARPEEIASTVLFLASDHASHITLQDIVVDGGSTLGA

SEQ ID NO: 91825 - protein, 250 aa, Leclercia sp.
  REGION 1..250: note = tr|A0A0J6MQA2|A0A0J6MQA2_9ENTR 2,3-dihydroxybenzoate-2,3-dehydrogenase OS=Leclercia sp. LK8 OX=1628210 GN=VK95_03540 PE=4 SV=1
MGWDFTGKTVWVTGAGKGIGYATALAFAEAGAQVTGFDLAFPQDHYPFTTETLDVADAAQVHEVCGRVLASLERLDVLVNAAGILRMGATDQLSQKDWQDTFAVNVGGAFNLFQQTMGQFRRQQGGAIVTVASDAAHAPRIGMSAYGASKAALKSLALTVGLELAGSGVRCNLVSPGSTDTDMQRTLWKSDDAEQQRIRGFGEQFKLGIPLGKIARPQEIAVTVLFLASDAASHITLQDIVVDGGSTLGA

SEQ ID NO: 91826 - protein, 248 aa, Leclercia sp.
  REGION 1..248: note = tr|A0A345CGZ5|A0A345CGZ5_9ENTR 2,3-dihydro-2,3-dihydroxybenzoate dehydrogenase; OS = Leclercia sp. W17 OX=2282309 GN=DVA44_17750 PE=4 SV=1
MDFTGKTVWVTGAGKGIGYTTALAFAEAGAQVTGFDVAFPQASYPFATEVLNVADAVQVNAVCGRLLAGMDRLDVLVNAAGILRMGATDQLSQDDWQQTFAVNVGGAFNLFQQTMGQFRRQQGGAIVTVASDAAHTPRIGMSAYGASKAALKSLALTVGLELAGSGVRSNLVSPGSTDTDMQRTLWKSDDAEQQRIRGFGEQFKLGIPLGKIARPEEIASTVLFLASDHASHITLQDIVVDGGSTLGA

SEQ ID NO: 91827 - protein, 250 aa, unidentified
  source 1..250: note = Lelliottia nimipressuralis
  REGION 1..250: note = tr|A0A4Y8IWX1|A0A4Y8IWX1_9ENTR 2,3-dihydro-2,3-dihydroxybenzoate dehydrogenase; OS = Lelliottia nimipressuralis OX=69220 GN=dhbA PE=4 SV=1
MGFDFTGKTVWVTGAGKGIGYATALAFAEAGAQVTGFDLAFPLGDYPFTTETLDVADDVQVSEVCGRALGTIERLDVLVNAAGILRMGATDQLSQEDWQQTFAVNVGGAFNLFQQTMGQFRRQQGGAIVTVASDAAHTPRIGMSAYGASKAALKSLALTVGLELAGSGVRCNLVSPGSTDTDMQRTLWKSDDAEQQRIRGFGEQFKLGIPLGKIARPQEIASTVLFLASDAASHITLQDIVVDGGSTLGA

SEQ ID NO: 91828 - protein, 251 aa, Litoreibacter sp.
  REGION 1..251: note = tr|A0A5B8IXS9|A0A5B8IXS9_9RHOB 2,3-dihydro-2,3-dihydroxybenzoate dehydrogenase; OS = Litoreibacter sp. LN3S51 OX=2599296 GN=dhbA PE=4 SV=1
MTFGLHGKRVLLTGAGGGIGHAVASAFHTEGAHVIATDRDRPTELPDAIRREAMDVTDSAAVDRLVTRIVAEDGPIDIGLSVAGVLSTTRVQDTSDAEWRRVFAVNTDGVFHLCRALARVMQPRGKGAIVVVSSNAAGIPRHAMAAYAASKAATTMFTRCLGLELAPHGIRCNIVAPGSTMTPMQTGMWPDEHGGAAVIRGSLETFKSGIPLGKIATPEEIADAVLFLASDRASHITMSDLYVDGGATLRG

SEQ ID NO: 91829 - protein, 252 aa, unidentified
  source 1..252: note = Lonsdalea populi
  REGION 1..252: note = tr|A0A3N0USD3|A0A3N0USD3_9GAMM 2,3-dihydro-2,3-dihydroxybenzoate dehydrogenase; OS = Lonsdalea populi OX=1172565 GN=dhbA PE=4 SV=1
MSLEAEFRGKQVWVTGAGRGIGYVTACRFALAGADVTGFDVAFDEADAPFLRRTLDISDAVAVADSCGELLAHTPRLDVLVNGAGILRMGATETLSQQDWLDCIGVNAGGAFNLFQATLPQFQRQRAGAIVSIGSNAAHVPRVGMAAYCASKAALRSLCLTVGLELAPYGVRCNLISPGSTDTPMQRSLWHAPDAEQRTIEGFPDHYKLGIPLRKIARPEDIADAVLFMASSRAGHITLQDIVIDGGATLGA

SEQ ID NO: 91830 - protein, 251 aa, Luteimonas sp.
  REGION 1..251: note = tr|A0A4Z1R1V5|A0A4Z1R1V5_9GAMM 2,3-dihydro-2,3-dihydroxybenzoate dehydrogenase; OS = Luteimonas sp. 1626 OX=2508325 GN=E4582_01055 PE=4 SV=1
MHLTGFEGRIALVTGAAGGIGAAVVTLLRASGAIVVATDLEAPASEANVHAFALDVTDSAAVDALVARVEAGIGPIDLAAHVAGVLSTTSVAETSDAEWRRTFAVNTDGVFHVGRALARVMAPRRRGALVVVGSNAAGIPRQAMAAYAASKAAATMFVRCLGLELAPHGVRCNVVAPGSTRTSMQTGMWADADGEARVIAGTLENFKSGIPLGKIAEPADIAHAVMFLLSAQAGHIAMGDLYVDGGATLRA

SEQ ID NO: 91831 - protein, 253 aa, unidentified
  source 1..253: note = Luteimonas terrae
  REGION 1..253: note = tr|A0A4R5UFI0|A0A4R5UFI0_9GAMM 2,3-dihydro-2,3-dihydroxybenzoate dehydrogenase; OS = Luteimonas terrae OX=1530191 GN=E2F49_06295 PE=4 SV=1
MQLTGFDGKIALVTGAAGGIGAALVRLLRQSGAIVVATDRDAPAIDDVEGIRAHALDVTDANAVDALVARIESGVGPIDLLVNVAGVLSTSAVLDLSADEWRRTFAVNTDGVFHVSQAVARVMTPRRRGAMVTVSSNAAGIPRQNMAAYAASKAATTMFVRCLGLELAPLGIRCNIVAPGSTRTPMQTGMWTDAGGEARTIAGTLETFKSGIPLGKLAEPEDIASAVMFLLSDQAGHIAMSDLYVDGGATLRA

SEQ ID NO: 91832 - protein, 240 aa, Luteococcus japonicus
  REGION 1..240: note = tr|A0A1R4KGE6|A0A1R4KGE6_9ACTN 2,3-dihydro-2,3-dihydroxybenzoate dehydrogenase of siderophore biosynthesis OS=Luteococcus japonicus LSP_Lj1; OX = 1255658 GN=FM114_14165PE=4 SV=1
MPGPVLITGAGGGIGSALVELLRRRGIPVVTTDLGGAVDHRCDLTDRSAVEAMVDRVEEEAGPLAGLAHVAGGLAAGSLLDGGLDELPRLLAVNPLATGHVLVAVGRRMRERGDGAIVVVASNAARVPRTRLGAYGASKAAVTSLTRSVGLELAEYGVRCNVVHPGSTDTPMLRESWAGGEERAARSATLAGDLTQHRLGIPLRRIAEPSDIAESLAFLLSPAARHITLAELVVDGGATL

SEQ ID NO: 91833 - protein, 264 aa, Lysobacter capsici
  REGION 1..264: note = tr|A0A108U5E1|A0A108U5E1_9GAMM 2,3-dihydro-2,3-dihydroxybenzoate dehydrogenase of siderophore biosynthesis OS=Lysobacter capsici AZ78; OX = 1444315 GN=AZ78_0413 PE=4 SV =1
MSGADTGDFAGRVAVVTGAAQGIGAATARRLAGEGAVLALIDRDADSLAGLVAQLRAGGTTVWARALDLCDAAAVETAMAEIEHELGAIEHLAHVAGILRVGDCLQLDPDDWDACMAVNARAVFTTTRAVARSMQARGRGSIVAVGSNAAATPRVGMAAYAASKAAASQYLRCLALELAPFGVRCNLVSPGSTDTAMQRAFADDEQARRDILMGVAERYRLGIPLQRIADPDDIAEAICFLLSDRARHITLHDLRVDGGATLDA

SEQ ID NO: 91834 - protein, 266 aa, Lysobacter enzymogenes
  REGION 1..266: note = tr|A0A3N2RF78|A0A3N2RF78_LYSEN 2,3-dihydro-2,3-dihydroxybenzoate dehydrogenase; OS = Lysobacter enzymogenes OX=69 GN=D9T17_15205 PE=4 SV=1
MNARQDGAGEFAGRVAVVVGAAQGIGAATAARLAGEGARLALIDRDGARLQATALALRGQGAQVSAQACDVADIGAVEAAVARIEDELGPIAHLAHVAGILRVGAAVELDPDDWDACMAVNARGVFATTRAVAARMRERRAGSIVAVGSNAAAAPRTGMSAYAASKAAATQYLRCLALELAPCGVRCNIVSPGSTDTAMQRAFAADEAARERILRGDGERFRIGIPLGRIAEPDDVAEAICFLLSDRARHITLHDLRVDGGATLDA

SEQ ID NO: 91835 - protein, 260 aa, unidentified
  source 1..260: note = Lysobacter maris
  REGION 1..260: note = tr|A0A2U9T9V2|A0A2U9T9V2_9GAMM 2, 3-dihydroxybenzoate-2, 3-dehydrogenase OS=Lysobacter maris; OX = 1605891 GN=C9I47_0576 PE=4 SV=1
MNAQSGEFAGHLALVTGAASGIGAAVARMLATRGAGLALIDRDADGLRALAATLPVDATCLTVDVVDAAAVERAVDAIEADRGPLDHLAHVAGILRIGDALEMAPDDWDACMAVNARAVFGTTRAVARRMRERRRGSIVVVGSNAATTPRAGMAAYAASKAAASAYLRCLALELAPHGVRCNLVSPGSTDTPMQQALAGSAQARQAILDGVPERYRLGIPLGRIAEAADVAEAVCFLLGERARHIVMHDLRVDGGATLDA

SEQ ID NO: 91836 - protein, 267 aa, Lysobacter sp.
  REGION 1..267: note = tr|A0A371JZX3|A0A371JZX3_9GAMM 2,3-dihydro-2,3-dihydroxybenzoate dehydrogenase; OS = Lysobacter sp. zong2l5 OX=2293254 GN=DX914_12960 PE=4; SV = 1
MSASPPLSEFDGRLILVTGAAQGIGAATALRLGASGARLALFDRDGDALSHTLAQLQAAGVRAQAWTVDLADAAATRAAIAEVEQDGGAIEHLAHVAGVLRTGALLDGADALADWDACMAVNARALVGIAQALAPAMARRRRGSIVVVGSNAASAPRIGMAAYAASKAAASQYLRCLALELAPHGVRCNLVSPGSTDTPMQRAFAADEAARNAILGGDAARFRLGIPLGRIAAAEDVAEAVCFLLSERARHITLHDLRVDGGATLDA

SEQ ID NO: 91837 - protein, 258 aa, Lysobacter sp.
  REGION 1..258: note = tr|A0A3M8SY69|A0A3M8SY69_9GAMM 2,3-dihydro-2,3-dihydroxybenzoate dehydrogenase; OS = Lysobacter sp. ZS60 OX=1327343 GN=EER27_08430 PE=4 SV=1
MEFRHRTVLVTGAAQGIGAATAQMLARQGAALALLDRDEERLHDTAASLRALGVPVFAQALDLTDIAALDDAVATIEREFGAIRHLAHVAGILRTGEVLDSRLEDWDACMAINARAVYGSTRAVARVMAARGHGSIVVVGSNAATVPRVGMAAYAASKAAASQYLRCLALELAPLGIRCNLVSPGSTDTAMQRAFAGDAQARRDILDGVPQRWRLGIPLRRIADPQDIAEAVCFLLSDRARHITLHDLRVDGGATLDA

SEQ ID NO: 91838 - protein, 250 aa, unidentified
  source 1..250: note = Magnetospira sp.
  REGION 1..250: note = tr|W6K7Q9|W6K7Q9_MAGSQ Putative Short-chain dehydrogenase/reductase SDR OS=Magnetospira sp. (strain QH-2) OX=1288970 GN=MGMAQ_2182 PE=4 SV=1
MTDTSSPSTGRLAGRIALITGASRGIGLAVAKRFAAEGAHLVLIARTQGALEELDDDLRAAGHEAPTLVPLDLLDFDSIDQVGAALYQRFGKLDILVGNAGLLESLTPMHQIDPKEWDKVMGVNLTANFRLIRAMDPLLRQSDAGRAIFLSSGTTKAPRVYWATYGVSKMALEYMVRSYALEVEKITNIKANLIDPGSTRTRMRASAYPGEDPDSLKTPEMIAGTFVEMASPEWESTGEVVRLDASGKPE

SEQ ID NO: 91839 - protein, 250 aa, Mangrovibacter sp.
  REGION 1..250: note = tr|A0A071M1D1|A0A071M1D1_9ENTR 2,3-dihydroxybenzoate-2,3-dehydrogenase OS=Mangrovibacter sp. MFB070 OX=1224318 GN=DT73_01130 PE=4 SV=1
MNPEFKDKTVWVTGAGKGIGYATAQAFAAAGANVTGFDLAFPLNNYAFSTVMMDVADDQQVSEVCRGQLASIQRLDVLVNAAGILTMGATDELTPEAWHRTFAVNVGGAFNLFRHTMAQFRHQKGGAVVTVASDAAHTPRIGMSAYGASKAALKSLAQTVGLELAPFGVRCNLVSPGSTDTDMQRTLWLSDDAEQQRIRGFAEQFKLGIPLGKIARPEEIANTVLFLASELASHITLQDIVVDGGSTLGA

SEQ ID NO: 91840 - protein, 285 aa, Marinomonas mediterranea
  REGION 1..285: note = tr|F2JZ72|F2JZ72_MARM1 2,3-dihydro-2,3-dihydroxybenzoate dehydrogenase; OS = Marinomonas mediterranea (strain ATCC 700492 / JCM 21426 / NBRC 103028 / MMB-1) OX=717774 G N=Marme_2827 PE=4; SV = 1
MPVAQTVTHRPAAPDPLDFTGKTVWVTGAGRGIGREVALQFVERGANVVGFDLQFEKADVTTSPLEALAQSKEQSSEKERGTLINVELDISDESAVDKQVSRLLKESSALDILVNAAGILRMGAVEDTSLDDFKKCFDVNAGGVFLMLRSTIPHFKKQKSGCIVTISSNAAKVPRANMAAYCASKAALSALNNTAALELAPYGVRCNLVCPGSTDTPMQRMLWTSDDAESKTIQGFPEQYKLGIPLGKIAQPSEIAQTVLFFASPMASHITMQDVVVDGGATLNA

SEQ ID NO: 91841 - protein, 251 aa, Marinomonas posidonica
  REGION 1..251: note = tr|F6CU81|F6CU81_MARPP 2,3-dihydro-2,3-dihydroxybenzoate dehydrogenase; OS = Marinomonas posidonica (strain CECT 7376 / NCIMB 14433 / IVIA-Po-181) OX=491952 GN=Mar181_2 162 PE=4 SV=1
MSLLDFAGKTVWVTGAGRGIGLEVANQFLSLGANVIGFDLAFDETSYEFECITLDISDEQRVKSLVDHALLKHPVLDVLVNAAGILRMASVEETSWQDFSDCINVNAGGAFLMIKHTMARFKQQRHGAIVTVSSNAAKVPRTNMMAYCASKAALSSISHTAGLELAPYGVRCNLVCPGSTDTPMQRQLWQDEKAEANTIKGFPEQYKLGIPLGKIAAPSDIAQVVLFFASSMANHITMQDVVVDGGATLNV

SEQ ID NO: 91842 - protein, 252 aa, unidentified
  source 1..252: note = Marinomonas profundimaris
  REGION 1..252: note = tr|W1RQ32|W1RQ32_9GAMM 2,3-dihydroxybenzoate-2,3-dehydrogenase OS=Marinomonas profundimaris OX=1208321 GN=D104_13825 PE=4 SV=1
MMNPLDFSNKTVWVTGAGRGIGLEVANQFAEQGAKVIGFDLAFDGGHYGFDCIVLDISDDRAVKQVVERVITKDPVLDVLVNGAGILRLGSLETTTLEDFQHCFNVNAGGPFLMIKHTMATFKRQRQGAIVTISSNAAKVPRQNMAAYCASKAALSALSHTAGLELAPYGVRCNVVCPGSTDTPMQRMLWSTDDAEANTIKGFPEQYKLGIPLGKIAQPSDIAQTVLFFASSMSNHITMQDVVADGGATLNA

SEQ ID NO: 91843 - protein, 276 aa, Massilia plicata
  REGION 1..276: note = tr|A0A4V1AUH7|A0A4V1AUH7_9BURK 2,3-dihydro-2,3-dihydroxybenzoate dehydrogenase; OS = Massilia plicata OX=321984 GN=dhbA PE=4 SV=1
MLADQKNLGAAASPRAPEPPALQFEGRQVWVTGAGRGIGHQIALAFRQLGARVTGIDRSFDREEAGPAGKRYPFRTVSMDITDRPRIATVCQQLLTEMPRVDVLVNAAGVLRLGTLDSTTVEDWQASFDINVSGVFYLMRELMPQFRAQGAGSIVNVASNAARVPRMNMLAYCASKSALVGMSHCAALELAQYGVRCNVVSPGSTDTPMLRSMLPDEAGMRRTIEGLPEQFKLGIPLRKIATAREVANTVLFLASDLASHITMQELVVDGGATLAA

SEQ ID NO: 91844 - protein, 260 aa, Massilia sp.
  REGION 1..260: note = tr|A0A430HGB8|A0A430HGB8_9BURK 2,3-dihydro-2,3-dihydroxybenzoate dehydrogenase; OS = Massilia sp. SOD OX=2495579 GN=EJB06_23180 PE=4 SV=1
MTNQFEGKVALVTGAAQGIGAAVARKLAAGGAAVAVFDVKAGAVEDMAATLRASGTRAIGIAVDVTDSAAVNAAVAQVERELGEIDVLVNVAGILRMGSILDCSDDDWERTFAVNAGGVFRLCRAVAAGMVERKRGAIVTVASNASSVPRMQMGAYAASKAASTQFMRCLGLELAPHGIRCNVVSPGSTDTEMQRQLWNGADGSQGVIGGSLETFRLGIPLKRIATPEDIAEAVLYLASDSARHITMHDLRIDGGATLGG

SEQ ID NO: 91845 - protein, 276 aa, Massilia sp.
  REGION 1..276: note = tr|A0A344JNH3|A0A344JNH3_9BURK 2,3-dihydro-2,3-dihydroxybenzoate dehydrogenase; OS = Massilia sp. YMA4 OX=1593482 GN=DPH57_08265 PE=4 SV=1
MLADQKNLGTASAERPQAPPALQFEGRQVWVTGAGRGIGHQIALAFRQLGARVVGIDRAFDREEAGPAGKRYPFKTVCMDVTDRARIAVVCQQLLTEMPRIDVLVNAAGVLRLGTLDSTTVEDWQASFDINVSGVFYLLRELMPQFRKQGAGSIVNVASNAARVPRMNMLAYCASKSALVGMSHCAALELAQYGVRCNVVSPGSTDTPMLRSMLPDEQGMRRTIEGLPEQFKLGIPLRKIATAREVANTVLFLASDLASHITMQEVVVDGGATLAA

SEQ ID NO: 91846 - protein, 244 aa, Meiothermus granaticius
  REGION 1..244: note = tr|A0A399F7K5|A0A399F7K5_9DEIN 2,3-dihydro-2,3-dihydroxybenzoate dehydrogenase; OS = Meiothermus granaticius NBRC 107808 OX=1227551 GN=entA; PE = 4 SV=1
MELRGQTLILTGASRGIGRALALELARAGANLVLNARSEEALEQVTREVQGLGVQARAVVGDAAQDATAQFAVKAAKVIGGFAGFIHNAGVLHPGPRLWELSEAEFDQVFATHVKAGFLLAKYAFPNLRRQGSGIAVFVGSGAAHHPRVGWGAYGAAKAAEHYLAFNLAQEAPEITTLVYSPGTVDTEMQRQGRAAKGEIAQMFQGFQREGRLIQPEETAAALVRILAGEPRRFHGKIATYNDA

SEQ ID NO: 91847 - protein, 244 aa, unidentified
  source 1..244: note = Meiothermus roseus
  REGION 1..244: note = tr|A0A399EUA0|A0A399EUA0_9DEIN 2,3-dihydro-2,3-dihydroxybenzoate dehydrogenase; OS = Meiothermus roseus OX=1644118 GN=entA PE=4 SV=1
MSLKQQTWILTGASRGIGRAVALELAHAGANLVLGARNPQALEAVAQECRALGVQAKSVAGDAALDQTAQFLVKAAKVIGNFAGFIHNAGVLHPGPTLWELSEAQFDEVFGANVKAAFQLARYAYPNLIRRGGGVAVFVGSGAAKRNVAGWGAYGAAKAAEHYLAAQLALEEPRITCFVYSPGPVDTDMQRQGREAPGPIATMFQGFKEQGHLLSPEQSARALVRLLQTDPHRFHGKIATYNDA

SEQ ID NO: 91848 - protein, 252 aa, Mesorhizobium sp.; identical to SEQ ID NO: 91559
  REGION 1..252: note = tr|A0A4S0VQT3|A0A4S0VQT3_9RHIZ 2,3-dihydro-2,3-dihydroxybenzoate dehydrogenase; OS = Mesorhizobium sp. M00.F.Ca.ET.170.01.1.1 OX=2500524; GN = EN813_003215 PE=4 SV=1

SEQ ID NO: 91849 - protein, 260 aa, Methanothrix soehngenii
  REGION 1..260: note = tr|F4BT48|F4BT48_METSG 2,3-dihydro-2,3-dihydroxybenzoate dehydrogenase (Coldshock protein CSI14) OS=Methanothrix soehngenii (strain ATCC 5969 / DSM 3671 / JCM 10134/ NBRC 103675 / OCM 69 / GP-6); OX = 990316 GN=MCON
MGRVDGRVAIITGSTYGIGEAIARVLAKEGALSIITGRSREEGRKVVEAINSAGGRSEYYPLDVTDEKRIEEVSKAVYEKYGRIDILVNNAGVAGPNKPTHEYARAEWEWVFDVNVTGAFLCTKYVVPYMQRQKSGNIVYISSIYGIIGAPDLPAYHATKAANRVMAKIDALLYAKDNIRVNSVHPGFIWTPLVDNFLQEQCNKSGLSCEELKKQLDAKHPIGHIGEPDDIAYGVLYLVSDEAKFVTGSELIIDGGYTAT

SEQ ID NO: 91850 - protein, 248 aa, Methylocystis hirsuta
  REGION 1..248: note = tr|A0A3M9XL45|A0A3M9XL45_9RHIZ 2,3-dihydro-2,3-dihydroxybenzoate dehydrogenase; OS = Methylocystis hirsuta OX=369798 GN=D1O30_04540 PE=4 SV=1
MDFSGKQIWVTGAGQGIGYATAAQFAALGGDVVGLDKSFAASNYPFATVRLDVSERDQVQKTCRALLEECPRLDVLVSAAGVLRLGSTEELSFDDWAACMNVNASGPFHLFQQTIPQFKRQRSGAIVSIGSNAAHTPRMLMSAYCASKAALTSLTHCVGLELAPYGVRCNLVSPGSTDTAMQRSMWRSADAEKQVIAGDLGSFKLGIPLGKIAAPEEIASAVVFLASDLASHITLQDLVVDGGATLAA

SEQ ID NO: 91851 - protein, 248 aa, Methylocystis rosea
  REGION 1..248: note = tr|A0A3G8M8V1|A0A3G8M8V1_9RHIZ 2,3-dihydro-2,3-dihydroxybenzoate dehydrogenase; OS = Methylocystis rosea OX=173366 GN=dhbA PE=4 SV=1
MNFSGKRIWVTGAGQGIGYATAAQFAALGGDVVGLDMTFAGSNYPFAPVRLDVSDRDQVQETCRALLKERPRLDVLVSAAGVLRLGLTEELSLDDWAACMNVNASGPFHLFQHTIPQFKRQRSGAIVSVGSNAAHTPRMLMSAYCASKAALTSLTHCVGLELAPYGVRCNLVSPGSTDTAMQRSMWRSADAEKQVIAGDPGSFKLGIPLGKIAAPEEIASAVVFLASDLASHITLQDLVVDGGATLAA

SEQ ID NO: 91852 - protein, 248 aa, Methylosinus sporium
  REGION 1..248: note = tr|A0A549SMU8|A0A549SMU8_METSR 2,3-dihydro-2,3-dihydroxybenzoate dehydrogenase; OS = Methylosinus sporium OX=428 GN=dhbA PE=4 SV=1
MDFTGKRVWVTGAGQGIGFCAATTFVALGANVVGLDRAFAEARYPFRTLVVDIADHAQAERVCAQLLDECGRLDVLVNAAGILRLGATEEVSLEDWRASFDVNVSGAFHLLRHTIAQFKRQRSGAVVIVGSNAAHVPRLSMAAYCASKAALASLTHCVALELAPYGVRCNLVSPGSTDTPMQRSMWRAPDAEQRVIAGNPETFKLGVPLGKIATPQEIANVIAFLASDLASHIVMQDIVVDGGAALTA

SEQ ID NO: 91853 - protein, 254 aa, Microbacterium hydrocarbonoxydans
  REGION 1..254: note = tr|A0A0M2HP30|A0A0M2HP30_9MICO 2,3-dihydro-2,3-dihydroxybenzoate dehydrogenase; OS = Microbacterium hydrocarbonoxydans OX=273678 GN=entA_2; PE = 4 SV=1
MNITGNTIFIPGATSGIGLALARSLSARGNTVIVGGRRTDLLERIAQETPELRTVAIDTSDADSIRSAAASVLAAHPDLNVLITMAGIMRVEDWTSPEGFLETAEATVTTNLLGPIRLIAAFIEHLRSVPEATIMTVSSGLAFAPLRVTPTYNATKAAIHMLSESVRLQLSGSAVRVVELEPPSVRTALMPGQEESEFAMPLDDFIAEVMTLIETQPDADEIQVENVKFLRYGEARGDYAQVVATLNRLDPHGR

SEQ ID NO: 91854 - protein, 254 aa, Microbacterium oxydans
  REGION 1..254: note = tr|A0A3S9WJW1|A0A3S9WJW1_9MICO 2,3-dihydro-2,3-dihydroxybenzoate dehydrogenase; OS = Microbacterium oxydans OX=82380 GN=entA PE=4 SV=1
MNISGNTIFIPGATSGIGLALALRLRERGNTVIVGGRREDRLATIAGEHPDIHTVRVDTTDASSIEAAAAEVLAAHPGLNVLITMAGVMRAEDWSTPSGFLSAAEETVVTNILGPIRLIAAFVEHLRAQADATIMTVSSGLAFAPLRVTPTYNASKAAIHMLSESLRLQFEGSSVSVLELEPPAVRTALMPGHEDNASAMPLDEFIDEVMALIEAQPDAAEIQVERVKFLRYGEARGDYDQVVATLNRTDPHGR

SEQ ID NO: 91855 - protein, 254 aa, Microbacterium sp.
  REGION 1..254: note = tr|A0A0F2C7F4|A0A0F2C7F4_9MICO 2,3-dihydro-2,3-dihydroxybenzoate dehydrogenase; OS = Microbacterium sp. SA39 OX=1263625 GN=entA PE=4 SV=1
MNITGNTIFIPGATSGIGLALARALRVKGNTVIVGGRRTALLREIVASDPGIHTVQIDTTDADSIRSAASEVLSAHPDLNVIIAMAGVMRVEDWSQPAGFLATAEETITTNVLGPIRLIGAFIEHLRSTPDATIMTVSSGLAFAPLAATPSYNASKAAIHMLSESLRLQLAGTSVKVVELEPPSVQTDLLPGQRDSDFAMPLDSFISEVVGLIEAQPDAAEIQVENVKFLRYGEARGDYDQVVATLNGRDPHGR

SEQ ID NO: 91856 - protein, 63 aa, Microbacterium sp.
  REGION 1..63: note = tr|A0A074UFT9|A0A074UFT9_9MICO 2,3-dihydroxybenzoate-2,3-dehydrogenase (Fragment); OS = Microbacterium sp. SUBG005 OX=1504156 GN=HR12_08145; PE = 4 SV=1
MMAFDFTGKTVWVTGAGKGIGYATALAFVEAGAQVTGFDLAFPHGEYPFATETLDVADAAQAS

SEQ ID NO: 91857 - protein, 224 aa, Microbacterium trichothecenolyticum
  REGION 1..224: note = tr|A0A0M2HBQ4|A0A0M2HBQ4_9MICO 2,3-dihydro-2,3-dihydroxybenzoate dehydrogenase; OS = Microbacterium trichothecenolyticum OX=69370 GN=dhbA; PE = 4 SV=1
MPVIAIIGAGPGLGAAVARRFGREGFSIALISRNQSKLDAMAAELNAGGVIARGYAADVRVPTALGEALARAAAELGPITALQYSPLPAREYLKPVLEMTPELALEALQFSALGLIHAVRAVLPAMRGAGDGSVILINGGTSVKARADFAGTSVAFPAESAYGEMLHDALEGEGVRVAQLVIPGSIPKLQLVNGIDDVADRIWDLHAVAGPFRTMLIPLEDGRE

SEQ ID NO: 91858 - protein, 247 aa, Microlunatus phosphovorus
  REGION 1..247: note = tr|F5XI88|F5XI88_MICPN 2,3-dihydro-2,3-dihydroxybenzoate dehydrogenase; OS = Microlunatus phosphovorus (strain ATCC 700054 / DSM 10555 / JCM 9379 / NBRC 101784 / NCIMB13414 / VKM Ac-1990 / NM-1) OX=1032480 GN=dhbA P
MTGAAGGIGRALTTALVRDGYAVGALDADAAGLDELLTAYPLADRARVLPLVADVRRRSEVEAAIEKLAVSFGEPNAVALCSGVLRPARLEATDEADWAWHLAVNATGTFHLLQSVAPRLTTGSSIVLIGSNAASVPRVGMAAYAASKAAAETLVRCAGLELATRGIRCNVIEPGSTDTKMQRDLWPDPAIGQAIAVDGDPAGFRVGIPLGRIADPADVAEVAAFLLSDRARHVTLQTVRVDGGASL

SEQ ID NO: 91859 - protein, 261 aa, Micromonospora sp.
  REGION 1..261: note = tr|A0A385AT18|A0A385AT18_9ACTN 23-dihydro-23-dihydroxybenzoate dehydrogenase; OS = Micromonospora sp. B006 OX=2201999 GN=MicB006_2899 PE=3; SV = 1
MELTGIESKVALVTGAGQGIGAAVAGVLARAGAQVAAVDRNAEALTTVVTKLAAEGDSARAYCVDVCDSEAVDALVRRVEDEMGPVAILVNAAGVLHTGRVVELSDRQWRRTFSVNADGVFHVSRAVARRMVGRRRGAIVTVASNAAGVPRTEMAAYAASKAASAQFTRCLGLELSGYGIRCNVVSPGSTDTPMLRAMLGEGADPSAVIEGTPGAYRVGIPLRKLAQPRDVAEAVAYLVSDQAGHVTMHDLYVDGGAALHV

SEQ ID NO: 91860 - protein, 257 aa, Micromonospora sp.
  REGION 1..257: note = tr|A0A518W9T2|A0A518W9T2_9ACTN 2,3-dihydro-2,3-dihydroxybenzoate dehydrogenase; OS = Micromonospora sp. HM134 OX=2583243 GN=FJK98_01255 PE=4; SV = 1
MSTTGTALVTGAAGGIGAEVARALARRGTPVAAVDSDADRLRATVDEARSAGLPLTAYPADVRVGAAVRDLVDTVERALGPIDALVNAAGVLRSGEARTLTEEDWQLTFAVNATGVFHTCRAVADRMVPRRRGTIVTVASNAAGTARAGMSAYGASKAAATAFTKALGLEVARYGIRCNVVAPGSTDTPMLAALLPDDAARRSTIGGVPEAYRVGIPLGRIADPADIAAAVLFLISDDARHITMQHLTVDGGATLGV

SEQ ID NO: 91861 - protein, 256 aa, Micromonospora sp.
  REGION 1..256: note = tr|A0A4R4UC47|A0A4R4UC47_9ACTN 2,3-dihydro-2,3-dihydroxybenzoate dehydrogenase; OS = Micromonospora sp. KC606 OX=2530379 GN=E1193_06495 PE=4; SV = 1
MEKRVAFVTGSAGGIGAAIARRLAEDDMAVALVDLPSLRLSQVAEVLTDKGMVVCTVPADVSDRAQVRAAVADAERRLGPIDALVNAAGVLRLGKVGELTDDDWAATFAVNAYGVFCTSQAVVERMAPRGRGAVVTVASNAAGTPRMSMAAYCASKSAATMFTKVLGLEMAEHGIRCNVVAPGSTDTPMLRSMWSGGSGPETALAGSPEAYKVGIPLRKLASAEDIADAVAFLLSDAAGHITMHSLTVDGGAALGA

SEQ ID NO: 91862 - protein, 261 aa, Micromonospora sp.
  REGION 1..261: note = tr|A0A4R4L8T9|A0A4R4L8T9_9ACTN 2,3-dihydro-2,3-dihydroxybenzoate dehydrogenase; OS = Micromonospora sp. KC723 OX=2530381 GN=E1165_01915 PE=4; SV = 1
MQFREFHDRIALVTGAGSGIGAAVARALAANGATVAALDRDAERLRATVEKIRSDDHRATAYEVDVSDRARVERVVDRVETELGPISYLVNSHGVLHVGEVTALADEQWTECLEVNATGVFLVTRAVVGRMTSRAAGAVVNIASNVVGTARSGMSAYSASKAAVSAFTRCLALEVAPHGIRCNLVAPGSTDTPMLRALWPDGDAVSASIAGRPEAYRVGIPLGKVAQPGEVADAVLYLLSDRASHITMQQLTVDGGATLGV

SEQ ID NO: 91863 - protein, 254 aa, Micromonospora sp.
  REGION 1..254: note = tr|A0A2P8AZV0|A0A2P8AZV0_9ACTN 2,3-dihydro-2,3-dihydroxybenzoate dehydrogenase; OS = Micromonospora sp. MH33 OX=1945509 GN=entA PE=4 SV=1
MNISGNSIFIPGATSGIGLALALELRARGNTVIVGGRRTDLLDTIAAEHPGIDTVEIDTTDPASIDSAAKAVLAKHPDLNVLITMAGIMRIEDWRRPESFLASAEATVTTNLLGPIRLIAAFIEHLRAQPDATIMTVSSGLAFAPLRVTPSYNASKAAIHMLSESLRLQLADTTVKVVELEPPSVRTSLLPGQENSEFGMPLDEFVAEVVALIESQPDATEIQVERVKFLRYGETRGDYDQVVATLNAADPHSD

SEQ ID NO: 91864 - protein, 261 aa, Micromonospora sp.
  REGION 1..261: note = tr|A0A505HPG2|A0A505HPG2_9ACTN 2,3-dihydro-2,3-dihydroxybenzoate dehydrogenase; OS = Micromonospora sp. XM-20-01 OX=2583240 GN=FJ969_02545; PE = 4 SV=1
MELTGIESRVALVTGAAQGIGAAVAGVLARAGAQVAAVDRNAEALTTVVTKLAAEGDSARAYCVDVCDSDAVDALVRRVEDEIGPVGILVNAAGVLHTGPVVELSDRQWRRTFSVNADGVFHVSRAVARRMVGRRRGAIVTVASNAAGVPRTEMAAYAASKAASAQFTRCLGLELSGYGIRCNVVSPGSTDTPMLRAMLGEGADPSAVIEGTPGAYRVGIPLRKLAQPRDVAEAVAYLVSDQAGHVTMHDLYVDGGAALHV

SEQ ID NO: 91865 - protein, 125 aa, unidentified
  source 1..125: note = Unknown
  REGION 1..125: note = tr|A0A1J5P5U5|A0A1J5P5U5_9ZZZZ 2,3-dihydro-2,3-dihydroxybenzoate dehydrogenase OS=mine drainage metagenome OX=410659 GN=entA_4 PE=4 SV=1
MIRQENGGRILFMSSVTGHQAHQNLAAYGMTKAALEMLAKSLVIELSQFQITVNTVAPGATLTERTMEDAGYKNTWSRITPMGRPATVEDVANAVLFLVSAQAGHITGQNIIVDGGWTAVSTSPY

SEQ ID NO: 91866 - protein, 249 aa, unidentified
  source 1..249: note = Mixta sp.
  REGION 1..249: note = tr|A0A506VAZ9|A0A506VAZ9_9GAMM 2,3-dihydro-2,3-dihydroxybenzoate dehydrogenase OS=Mixta sp. BIT-26 OX=2562439 GN=dhbA PE=4 SV=1
MMPFSGQTVWVTGAGSGIGEQVAMRFVEAGAKVIGFDLAFPRRNPPFTAVTLDLSDPAAVREVCAPLLAAGDLDVLVNGAGILRLGALETISWDRWQQSLNVNAGAAFNLFQLTIPHFQRRRRGNIVSIVSNAAHAPRVNMAVYCASKAAMRSLCLSAGLELAPWGIRCNLVSPGSTLTPMLEKMLGDDPAARQRLIEGLPAQFKLGIPLGKIALPDEIASCVLFLASDAASHITLQDIVIDGGATLGA

SEQ ID NO: 91867 - protein, 258 aa, Moritella sp.
  REGION 1..258: note = tr|A0A137SGL7|A0A137SGL7_9GAMM 2,3-dihydro-2,3-dihydroxybenzoate dehydrogenase; OS = Moritella sp. JT01 OX=756698 GN=AKG98_472 PE=4 SV=1
MSLKNKKILLVGAASGIGLSVLDSLLSAGANVTVADKQIDLLKQNSESLFPQYSEQFQCHYLDLADHSSITRSVDIWQEQGAFDHLVCCAGVLHIGALHELPLETVKRTFDINTFGVLALMQAVAKTMKNQRSGSMVIVGSNAANTPRQSIGAYGASKAALHLMVKCIGIELASFGIRCNIVSPGSTDTPMQRQLWTDDYGEPEVIAGDASQFRLGIPLNKLAQPKDIAHAVLFLLSDAAGHITMHDLRVDGGATLDN

SEQ ID NO: 91868 - protein, 263 aa, Mycetocola reblochoni
  REGION 1..263: note = tr|A0A1R4IC54|A0A1R4IC54_9MICO 2,3-dihydro-2,3-dihydroxybenzoate dehydrogenase of siderophore biosynthesis OS=Mycetocola reblochoni REB411; OX = 1255698 GN=FM119_00935PE=4 SV=1
MSADRRQAIVVTGAAGGIGSAIVSAILAGPADHGAARVYALDAHWPDDAPADTADLVRRRIDVTDEEAVASFFDELGERETLRALVNAAGVLATGPAVELDRRTLDRVLAVNVVAVIGASLAAARLMLRQGASAARHRDRSILTVASNAGTIPRAGFAAYGASKAAASQFTRSLGLELGPAGIRCTVLNPGTTRTAMVERMWGGRDRSAEAIAGDPALFRAGIPLGRVAEPEDIASVAAFLIGDGARHITAEEITVDGGATAR

SEQ ID NO: 91869 - protein, 274 aa, unidentified
  source 1..274: note = Mycobacterium basiliense
  REGION 1..274: note = tr|A0A447GJX0|A0A447GJX0_9MYCO 2,3-dihydro-2,3-dihydroxybenzoate dehydrogenase; OS = Mycobacterium basiliense OX=2094119 GN=dhbA PE=4 SV=1
MPRFQPHPDRRPAIVAGASSGIGAATAVDLAAHGFPVALGARRVEKCQEIAEKIQADGGEAVALPLDVTDANSVKGFVHRATEQLGDIEILVAGAGDTYFGRLHEIDTETFESQVQIHLIGANRLATAVLGGMLERQRGDLIFVGSDVALRQRPHMGAYGAAKAGLLAMVTNLQMELEGTGVRASIVHPGPTKTAMGWSMPVEAVGPALEDWAKWGQARHNYFLRATDIARAITFVTETPRGGFVANIELQPEAPLAATKERQQLKVDEKDLKS

SEQ ID NO: 91870 - protein, 112 aa, Mycobacterium kansasii
  REGION 1..112: note = tr|A0A1V3WVP5|A0A1V3WVP5_MYCKA 2,3-dihydro-2,3-dihydroxybenzoate dehydrogenase domain protein OS=Mycobacterium kansasii OX=1768 GN=dhbA2 PE=4; SV = 1
MVTNLQMELEGTGVRASIVHPGPTKTGMGWSLPVESIGPALQDWAKWGQARHNYFLRASDIARAITFVAETPRGGFVVNMELQPEAPLADATDRHQLRVDEKAFVDEGKLDS

SEQ ID NO: 91871 - protein, 275 aa, Mycobacterium tuberculosis
  REGION 1..275: note = tr|A0A0T7LAA9|A0A0T7LAA9_MYCTX Oxidoreductase; OS = Mycobacterium tuberculosis OX=1773 GN=dhbA PE=4 SV=1
MPRFEPHPARRTTVVAGASSGIGAATATELAGRGFPVALGARRMDKLAELVDKIRADGGEAVAFPLDVTDPESVKSFVAQTVEALGEVELLVSSAGDMLPGQLHEVSTEAFAEQVQIHLVGANRLATAVLPAMAARRRGDLIFVGSDVGLRQRPHMGAYGAAKAGLAAMVTNLQMELEGTGVRASIVHPGPTLTGMGWQLSAEQVGPMLADWAKWGQARHNYFLRPSDLARAIAFVAETPRGCVVVNMEIQPEAPLRDAPAHRQKLVLGEEGMPG

SEQ ID NO: 91872 - protein, 280 aa, Mycobacterium xenopi
  REGION 1..280: note = tr|A0A2X1T5L5|A0A2X1T5L5_MYCXE Short-chain type dehydrogenase/reductase OS=Mycobacterium xenopi OX=1789; GN = entA PE=4 SV=1
MTAIEQFRYDGKRVLVVGGATGMGAAAAQTAAELGAEVVVMDYAPVPYEVAQSVQVDLADRSSIDSALGQVKEPIHAIFSAAGVAEGPKLMRVNFIGHRHLIETMLADGRLPRGSAICFISSVGGIGWESNLPLLQEFLATPDYESADAWVKAHEPEGIIHYGFSKQAINAYVATKAYPFMAKGIRINAICPGPTDTPLARANADLWLTFAQDYRDATGCEIHTPQQMANTMAFLNSGAASGISGVTLLVDNGHVMSSMTGSFAPGKPIIDLIIGRVSLA

SEQ ID NO: 91873 - protein, 255 aa, unidentified
  source 1..255: note = Mycobacteroides abscessus
  REGION 1..255: note = tr|A0A0U0ZLG0|A0A0U0ZLG0_9MYCO Putative short chain dehydrogenase/reductase OS=Mycobacteroides abscessus; OX = 36809 GN=entA PE=4 SV=1
MQISGNTVFIPGATSGIGLELALALQAKGNTVIVGGRRTELLDQIRRDHPGVSTVRIDISDPASIDIAAQQVLTDHPTLNILVTMAGIMRVEDWHHPESFLQSAEEIVTTNVLGPIRLIAAFIEHLQVRPEATIITVSSGLAFAPLKVTPSYNASKAAIHMLSESLRLQLADTRVEVKELLPPAVRTNLMPGQQESEFAMPLKDFIDEVIALLESEPDAHEIQVERVKFLRYGEVRGDYDDVVATLNASDPHARR

SEQ ID NO: 91874 - protein, 252 aa, unidentified
  source 1..252: note = Mycobacteroides abscessus
  REGION 1..252: note = tr|A0A1N5L1K1|A0A1N5L1K1_9MYCO Putative 2,3-dihydro-2,3-dihydroxybenzoate dehydrogenase; OS = Mycobacteroides abscessus subsp. abscessus OX=1185650; GN = dhbA_2 PE=4 SV=1
MVAVVTGAGGGVGSRVVTTLARRHERVVAVDIDEVAIKQLVEYAADEGLDVIGQILDITDDTAVAVGVSDIESRVGPITALVNGAGVLRTGAAVEFSDADWARTFDVNVRAPFVLSREVARRMIPRRAGSVVTVASNAALVARKGMTAYAASKAAANAFTKSLGLELAEYGIRCNVVAPGSTDTPMLRAMLGDSSDAGLVAGSLGDYKPGIPLGRVAQPQHIADAVAFLLSDQAAHITMHTLVVDGGATLGV

SEQ ID NO: 91875 - protein, 236 aa, unidentified
  source 1..236: note = Mycobacteroides abscessus
  REGION 1..236: note = tr|X8E1A6|X8E1A6_9MYCO 2,3-dihydro-2,3-dihydroxybenzoate dehydrogenase; OS = Mycobacteroides abscessus subsp. bolletii 1513; OX = 1299321 GN=dhbA PE=4 SV=1
MTTLARRDERVVAVDIDEVAIKQLVEYAADEGLDVIGQILDITDDTAVAVGVSDIESRVGPITALVNGAGVLRTGAAVEFSDADWARTFDVNVRAPFVLSREVARHMIPRRAGSVVTVASNAALVARKGMTAYAASKAAANAFTKSLGLELAEYGIRCNVVAPGSTDTPMLRAMLGDSSDAGLVAGSLGDYKPGIPLGRVAQPQHIADAVAFLLSDQAAHITMHTLVVDGGATLGV

SEQ ID NO: 91876 - protein, 252 aa, unidentified
  source 1..252: note = Mycobacteroides abscessus
  REGION 1..252: note = tr|A0A1N6B7Q3|A0A1N6B7Q3_9MYCO Putative 2,3-dihydro-2,3-dihydroxybenzoate dehydrogenase; OS = Mycobacteroides abscessus subsp. bolletii OX=319705; GN = dhbA_2 PE=4 SV=1
MVAVVTGAGGGVGSRVVTTLARRHERVVAVDIDEVAIKQLVEYAADEGLDVIGQILDITDDTAVAVGVSDIESRVGPITALVNGAGVLRTGAAVEFSDADWARTFDVNVRAPFVLSREVARHMIPRRAGSVVTVASNAALVARKGMTAYAASKAAANAFTKSLGLELAEYGIRCNVVAPGSTDTPMLRAMLGDSSDAGLVAGNLGDYKPGIPLGRVAQPQYIADAVVFLLSDQAAHITMHTLVVDGGATLGV

SEQ ID NO: 91877 - protein, 275 aa, unidentified
  source 1..275: note = Mycobacteroides abscessus
  REGION 1..275: note = tr|A0A1U0WK87|A0A1U0WK87_9MYCO 2,3-dihydro-2,3-dihydroxybenzoate dehydrogenase; OS = Mycobacteroides abscessus subsp. massiliense OX=1962118; GN = dhbA_1 PE=3 SV=1
MPRFEPHPARRPSIIAGASSSIGAATAIELAGRGFPVALGARRVDKLTELVEKIRSDGGEAVAFPLDVTDADSVKSFVAESIDALGEIDLLVSGAGDMYPGRVHEMSAATFAAQIQVHLLGANQLATEVVPDMVSRRRGDVVFIGSDVALHQRPHMGAYGAAKAALLAMVNTMRMELEGTGVRASIVHPGPTLTSMGWQLSAEQVGPMLEDWKSWGQARHSYFLRPSDIARAVTFVAETPRGAHIPEMEVQPEAPLKDAPADKQKLELGEEGMPS

SEQ ID NO: 91878 - protein, 275 aa, unidentified
  source 1..275: note = Mycobacteroides chelonae
  REGION 1..275: note = tr|A0A448GFU4|A0A448GFU4_MYCCH Short chain dehydrogenase OS=Mycobacteroides chelonae OX=1774 GN=dhbA; PE = 4 SV=1
MPRFDPLPDRRPVIVAGASSGIGEATAIEMAARGFPVALGARRVDKLEELVGKINADGGEAVGFRLDVTDPDSVKTFVAQATEALGDIEVLVAGAGDTDFGKIAETSTEDFERQLQIHLVGANRLATAVLPGMIERRRGDLIFVGSDVALRQRPHMGAYGAAKAGLVAMVTNLQMELEGTGVRASVVHPGPTKTNMGWSLPAEKLGPALEDWAKWGQARHDYFLRAKDLARAITFVAETPRGGFIASMELQPEAPLAEVKERQKLALGEEGVPNS

SEQ ID NO: 91879 - protein, 275 aa, unidentified
  source 1..275: note = Mycobacteroides franklinii
  REGION 1..275: note = tr|A0A4R8R6T9|A0A4R8R6T9_9MYCO 2,3-dihydro-2,3-dihydroxybenzoate dehydrogenase; OS = Mycobacteroides franklinii OX=948102 GN=dhbA_1 PE=4 SV=1
MPRFDPHPKRRPSIIAGASSGIGAATAIELAGRGFPVALGARRVDKLTELVDKIRTDGGEAVAFPLDVTDADSVKSFVAESIDALGEIDLLISGAGDMYPGRVHEMSADTFAAQIQVHLLGANRLATSIVPDMVARRRGDVIFIGSDVALHQRPHMGAYGAAKAALLAMVNTMRMELEGTGVRASIVHPGPTLTSMGWQLSAEQVAPMLEDWKSWGQARHSYFLRPSDIARAVSFVAETPRGVHIPEMEVQPEAPLKDAPPDKQKLELGEEGMPS

SEQ ID NO: 91880 - protein, 275 aa, unidentified
  source 1..275: note = Mycobacteroides salmoniphilum
  REGION 1..275: note = tr|A0A4R8SSR0|A0A4R8SSR0_9MYCO 2,3-dihydro-2,3-dihydroxybenzoate dehydrogenase; OS = Mycobacteroides salmoniphilum OX=404941 GN=dhbA_1 PE=3; SV = 1
MPRFEPHPDRRPSIIAGASSGIGAATAIELAGRGFPVALGARRVDKLTELVEKIRADGGEAVAFPLDVTDADSVKSFVAESIDALGEIDLLVSGAGDMSPGRVHEMSADTFAAQIQVHLLGANRLATAIVPDMVARRRGDVVFIGSDVALHQRPHMGAYGAAKAALLAMVNTMRMELEGTGVRASIVHPGPTLTSMGWQLSAEQVGPMLEDWKTWGQARHSYFLRPSDIARAVTFVAETPRGAHIAEMEVQPEAPLTDAPADKQKLELGEEGMPS

SEQ ID NO: 91881 - protein, 275 aa, unidentified
  source 1..275: note = Mycolicibacter terrae
  REGION 1..275: note = tr|A0A1X2DRK5|A0A1X2DRK5_9MYCO Short-chain dehydrogenase OS=Mycolicibacter terrae OX=1788 GN=dhbA; PE = 4 SV=1
MPRFDPPPARRPAIVAGASSGIGAATAEELARRGFPVALGARRADKLAKLVDKIRADGGEAVAFPLDVTDVESVKSFVAQSIDALGEIELLVSGAGDMSPGRIHEMSTEAFNDQIQVHLIGANRLATAVVPDMVARRRGDVIFVGSDVALQQRPHMGAYGAAKAALVAMVSNMRMELEGTGVRASIVHPGPTLTEMGWKLSAEQVGPMLEDWAKWGQARHSYFLRPADLARAIAFVAETPRGAHVVNLEVQPEAPLHETDSDRQHLQLGEEGMPS

SEQ ID NO: 91882 - protein, 248 aa, unidentified
  source 1..248: note = Mycolicibacterium aichiense
  REGION 1..248: note = tr|A0A378ULW9|A0A378ULW9_9MYCO Dehydrogenase of uncharacterized specificity, short-chain alcohol dehydrogenase like protein OS=Mycolicibacterium aichiense; OX = 1799 GN =entA PE=4 SV=1
MTELPARKVLVVGAGRGLGRGIACAFAESGADVVALARDGAALAALADTHPAIRTHVADASDAATARHVLDEYQPYTVIVVAGATPEMRELTQHSWETFSVNWDADVKIAFTWAQAALLQPMPRGSRVVIVSSGAALNGSPLSGGYAGSKATQRFIAQYAQRESERSGLGIIFTTVMPRMTPAGDVGRAGIRAYACEAGLTEDAFIEQLGPVITPEIAGQAMIDLVSLGRGDYAAGYVLTGAGLAPPT

SEQ ID NO: 91883 - protein, 275 aa, unidentified
  source 1..275: note = Mycolicibacterium chitae
  REGION 1..275: note = tr|A0A448HYR9|A0A448HYR9_MYCCI Short-chain dehydrogenase OS=Mycolicibacterium chitae OX=1792 GN=dhbA; PE = 4 SV=1
MARFEPHPDRRPALVAGASSGIGAATATQLAAHGFPVALGARRVEKCQELVDEIRAGGGEAIALPLDVTDADSVKSFVHGATEALGEIELLVAGAGDTDFGRIHETSTTEFEQQIQIHLIGANRLATAVLPGMVERRRGDVIFVGSDVALRQRPHMGAYGAAKSALVAMVTNLQMELEGTGVRASIVHPGPTKTSMGWSLSAEKIGPALEDWAKWGQARHDYFLRAADLARAITFVAETPRGGFIANLEIQPEAPLADVKDRQKLALGEEGMPGQ

SEQ ID NO: 91884 - protein, 275 aa, unidentified
  source 1..275: note = Mycolicibacterium flavescens
  REGION 1..275: note = tr|A0A448HM43|A0A448HM43_MYCFV Short-chain alcohol dehydrogenase OS=Mycolicibacterium flavescens OX=1776; GN = dhbA PE=4 SV=1
MPRFDPLPERRPVIVAGASSGIGEATAIEMAARGFPVALGARRVEKLEDIVGKINADGGEAVGFHLDVTDPNSVKTFVAQSVEALGEIEVLVAGAGDTYFGKLAEISTDEFESQLQIHLVGANRLASAVLPGMLARQRGDLIFVGSDVALRQRPHMGAYGAAKAALLAMVNNFQMELEGTGVRASIVHPGPTKTSMGWSLPAEKIGPALEDWAKWGQARHDYFLRAADLARAITFVAETPRGGFIANMELQPEAPLATAPAERQQLKLNEENLKS

SEQ ID NO: 91885 - protein, 275 aa, unidentified
  source 1..275: note = Mycolicibacterium phlei
  REGION 1..275: note = tr|A0A448H2F9|A0A448H2F9_MYCPH 2,3-dihydro-2,3-dihydroxybenzoate dehydrogenase; OS = Mycolicibacterium phlei OX=1771 GN=dhbA_2 PE=3 SV=1
MPRFEPHPRRRPSIIAGASSGIGAATAIELAGRGFPVALGARRVDKLTELVEKIQADGGEAVAFPLDVTDADSVKSFVAQSIDALGEIDLLVSGAGDMYPGRVHEMSADTFAAQIQVHLLGANRLATAIVPDMVARRRGDVVFIGSDVALHQRPHMGAYGAAKAALLAMVNTMRMELEGTGVRASIVHPGPTLTSMGWQLSAEQVGPMLEDWKTWGQARHSYFLRPSDIARAVTFVAETPRGAHIAEMEVQPEAPLTDAPADKQKLELGEEGMPS

SEQ ID NO: 91886 - protein, 259 aa, unidentified
  source 1..259: note = Mycolicibacterium smegmatis
  REGION 1..259: note = tr|A0A0D6IEI9|A0A0D6IEI9_MYCSM Short-chain dehydrogenase/reductase OS=Mycolicibacterium smegmatis; OX = 1772 GN=entA PE=4 SV=1
MKISGNTIFIPGSTSGIGLALALALRDKGNTVIIGGRRTPELDRITAEHPDLGGVVIDTTDPASIAAAAHQVLSDHPDLNVLVTMAGIMRVEDWHQPETFLATAEATVETNVLGPIRLIAAFVEHLQAQPDSTIVTVSSGLAFTPLGVTPTYNASKAAIHMLSESIRMQLADTSVKVVELVPPSVRTQLMPGHEEDENGVPLDVFIADVMTLLEAEPDAHEILVEQAKFLRYGEARGDYDHVVSILNAADPHAQHGASA

SEQ ID NO: 91887 - protein, 337 aa, unidentified
  source 1..337: note = Mycolicibacterium tokaiense
  REGION 1..337: note = tr|A0A378TA93|A0A378TA93_9MYCO Short-chain dehydrogenase/reductase SDR OS=Mycolicibacterium tokaiense; OX = 39695 GN=dhbA PE=4 SV=1
MTSHHQHPLGSGFTAASTTADILAGVELTGVNAVVTGGHSGLGAETTRALAGAGAAVTVAARNPDRAAQALSGLNVDIRRLDLMDPLSIDRFTAGWRETGRPLHILINNAGLPAPAAVQRDARGFEAQFATNHLGHFQLTLGLLPVLRAARGARVVTVSSGAQRFGHIRWEDLHFENGYNPDVAYAQSKVANVLFTVELDRRYRTDGIRGYAVHPGVVVGTALNAAGGPEQLRTMGLIDAAGHAIIRPETGRKTAAQGAATIVFAATSPLLAGIGGVYLMDNDISPVVAGDVPMTFSPDQAIPAEVAPHAIDPESARRLWQLSEELVSPTHHDRNGR

SEQ ID NO: 91888 - protein, 257 aa, Myxococcus fulvus
  REGION 1..257: note = tr|F8CAV5|F8CAV5_MYXFH 2,3-dihydroxybenzoate-2,3-dehydrogenase OS=Myxococcus fulvus (strain ATCC BAA-855 / HW-1) OX=483219; GN = LILAB_26325 PE=3 SV=1
MGTPTRVALVTGAAQGIGAAVARALAGEALIAAVDTNAEGLGTLVTELREQHHHAVGYPVSVSDVAAVDAVVERVERELGPIEVLANVAGVLRTGPVLSYSDEDWAFTFSVNTLGVFQVSRAVARRMVPRRRGVIVTVGSNAAAVPRTQMAAYAASKAASSMFTKCLGLELAPHGIRCNVVSPGSTDTAMQRALWADDSGAQAVIAGSPESYRLGIPLQRIASPEDIANAVRFLVSDAARHITLHDLRVDGGATLDA

SEQ ID NO: 91889 - protein, 257 aa, Myxococcus sp.
  REGION 1..257: note = tr|A0A540WQI3|A0A540WQI3_9DELT 2,3-dihydro-2,3-dihydroxybenzoate dehydrogenase; OS = Myxococcus sp. AM401 OX=2590453 GN=FJV41_35090 PE=3 SV=1
MGDTPRVALVTGAAQGIGAEVARVLAGEATIAALDTNAEGLLSLVAELRGKGQRATAWPVSVSDASAVETVVERIEKELGPIHTLVNVAGVLRMNPVVSLSDEDWATTFGVNTNGVFHVSRAVARRMVPRRAGVIVTVGSNAAGTPRMQMAAYAASKAASTMFTKCLGLELAQYGIRCNVVSPGSTDTAMQRGMWKDEHGADAVIAGASETFRVGIPLRRIATPRDIAEAVQFLASDRARHITMHDLCVDGGATLGV

SEQ ID NO: 91890 - protein, 257 aa, Myxococcus xanthus
  REGION 1..257: note = tr|Q1D689|Q1D689_MYXXD 2,3-dihydro-2,3-dihydroxybenzoate dehydrogenase; OS = Myxococcus xanthus (strain DK 1622) OX=246197; GN = MXAN_3647 PE=3 SV=1
MGTPTRVALVTGAAQGIGAAVARALAGEALIAAVDTNADGLSALVAELRQKHQHAVAYPASVSDVAAVDAVVERIERELGPIEVLANVAGVLRTGPILSYSDEDWAFTFSVNTLGVFQVSRAVARRMVPRRSGVIVTVGSNAAAVPRTQMAAYAASKAASSMFTKCLGLELAPHGIRCNVVSPGSTDTAMQRALWADDSGAQAVIAGSPEAYRLGIPLQRIATPEDIANAVRFLVSDAARHITLHDLRVDGGATLDA

SEQ ID NO: 91891 - protein, 262 aa, Nocardia brasiliensis
  REGION 1..262: note = tr|K0FAW8|K0FAW8_9NOCA 2,3-dihydroxybenzoate-2,3-dehydrogenase OS=Nocardia brasiliensis ATCC 700358 OX=1133849 GN=O3I_033285 PE=3 SV=1
MIGPQQASDSGAQRIALVTGAAGGIGHRIVYRLAAQGMVVVAVDRAADASKELRAMPGQVTIVQGDVTDPVDVERIVGDVERDIGPLDYLVNAAGIMRFGEIVELSEDDWEETFSVNTTGVFRVTKAVLTRMISRRRGAVVTVSSNAARTPRASMSAYSASKAAATMLAKCAALEVAKYGIRCNVVSPGSTRTEMLQATWEGEDRTEATIAGVPEKFRLGIPLGRIADPDDIVDAVEFLLSDRARHITMQELTVDGGATLGS

SEQ ID NO: 91892 - protein, 267 aa, Nocardia brasiliensis
  REGION 1..267: note = tr|A0A379BHY9|A0A379BHY9_9NOCA 2,3-dihydro-2,3-dihydroxybenzoate dehydrogenase; OS = Nocardia brasiliensis OX=37326 GN=dhbA_1 PE=4 SV=1
MNTIERQRDSGCALVVGAAGGIGGAVADRLAAAGRDLALLDRDGAALAVVGKQIRTNYGSDRRVTTHVADIGSRAEVERAVDEIERQHGPVGALACTAGVLHRGPLTDIDVDAVQRMIDVNVVGVLHLLASVGGRMKQRRRGSIVVIGSNAGAVPRLHIGVYGATKAAAALLTRVAALELAPYGVRANVVAPGSTDTPMLRALYPNEDEMVRHAVGGSPADFRLGIPLGRLAQASDIAAAVHFLLSDAARHITMQTLYVDGGATLHD

SEQ ID NO: 91893 - protein, 267 aa, Nocardia cyriacigeorgica
  REGION 1..267: note = tr|A0A2L2JS88|A0A2L2JS88_9NOCA 2,3-dihydro-2,3-dihydroxybenzoate dehydrogenase; OS = Nocardia cyriacigeorgica OX=135487 GN=dhbA PE=4 SV=1
MFMNVSGQRVVVVTGAAAGIGAATARRFASESHTLALWDRDPRVHRIAGEIVATAACSVIATEVDLTDATAVDAAFDALVTEYGAPDVVAHAAGIMRAGSALEITAQEWDTSLAVNATATMLVTQRAAREMVAAGRGSIVVVSSNAAAAPRVGMAAYCASKAAATAFTRALALQVAPHGVRVNLVSPGSTDTAMLRGLYADDDRPLDATARTALLDGDAHAYRLGIPLRRIATADDIAAAVRFLASAEARHITMHDLRVDGGATLDM

SEQ ID NO: 91894 - protein, 262 aa, Nocardia otitidiscaviarum
  REGION 1..262: note = tr|A0A378YFR4|A0A378YFR4_9NOCA 2,3-dihydro-2,3-dihydroxybenzoate dehydrogenase; OS = Nocardia otitidiscaviarum OX=1823 GN=dhbA_1 PE=4 SV=1
MPRFAPHPERRPVLIAGASSGIGAATALTLAEQGYPVALGARRVDQCEELADKIRADGGEAIAHRLDVTDGASVDAFATAAENALGPIEIVVSGAGDLEFGRIHATDPDVFDQQLRVHLGGAQRLAHRLLPGMIERRRGDFVVIGSDCADRPRPGMAAYNAAKIGAETLARQLRMELEGTGVRASVVRPGQTLTGMGMNAAPEVVGPLLEDWVKWGFARHSHFLRAADIAAAVAAVVSTPRGAHLVLVEVQPEAPLSDDGSR

SEQ ID NO: 91895 - protein, 254 aa, Nocardia seriolae
  REGION 1..254: note = tr|A0A1I9ZGX6|A0A1I9ZGX6_9NOCA 2,3-dihydro-2,3-dihydroxybenzoate dehydrogenase; OS = Nocardia seriolae OX=37332 GN=NS506_07070 PE=4 SV=1
MLGNYSDLAGKIAVLTGGSRGIGAETARMLAAQQSQVCVVGRDEQALDAVVAEISAAGGTAVGAVADVTSAAALAEVAALVEREFGRVDVLGVFAGGMGYPTPSSELSEELWRRVLDSDLTSAFLTVRAFLPMLLAQGSGSVVTMASSAGRQPSQANLAYGVANAGIIMMTRHLAAELGPRGIRVNAIAPSSILTEKVAANMPEAVQRQMAASHPLRRMGFPADVALAALFLASDASSYPSGITIDVAGGRITN

SEQ ID NO: 91896 - protein, 298 aa, Nocardioides dokdonensis
  REGION 1..298: note = tr|A0A1A9GPZ9|A0A1A9GPZ9_9ACTN 2,3-dihydro-2,3-dihydroxybenzoate dehydrogenase; OS = Nocardioides dokdonensis FR1436 OX=1300347 GN=dhbA PE=3; SV = 1
MVRARPWTAVPDQGGRRVVVTGATSGIGLLTSKVLAHRGAHVVLAVRDPAKGERVARELSSMRGRVEVSRLDVSDLDSVHAFAERTGEVDVLVNNAGVLGLPRSASAQGHELQLATNHLGHFALANLLLPRLRDRVVVVSSASHRHGDLDLEDLDWERRGYRPYAAYAASKLANMLFLAELQRRLGAAGSTLRATGAHPGNTRTAITSSTGNGLTTRVGAVGQGLVAMPAWRGALPVLYAATMDVPGNSYLGPDGPGELWGWPTQVGRSRAASDPDLARRTWTATERLTGVVWPFSRR

SEQ ID NO: 91897 - protein, 255 aa, Nocardiopsis alba
  REGION 1..255: note = tr|J7L4R6|J7L4R6_NOCAA 2,3-dihydro-2,3-dihydroxybenzoate dehydrogenase; OS = Nocardiopsis alba (strain ATCC BAA-2165 / BE74); OX = 1205910 GN=dhbA PE=4 SV=1
MNGIDGAVAMVTGAAGGVGRAVALDLAGHGARVAAVDVDADGLDRTLRLLRERGHRAGAFIADVTDTTRVEGLFDEIEADLGPVTLAVNAAGTLVTGPVADCDERDWHRVMAVNATGVFAVGRAVARRMGPRGHGALVTVASNAAGIPRSGMAAYAASKAAAVALTKSLGLELAPLGVRCNVVSPGSTDTPMLRAMTPDPAALVHGDPGRFKVGIPLGRIGSPEDVAEAVRFLLSDAARHITMHELYVDGGATLR

SEQ ID NO: 91898 - protein, 255 aa, Nocardiopsis sp.
  REGION 1..255: note = tr|A0A1R3UFY9|A0A1R3UFY9_9ACTN 2,3-dihydro-2,3-dihydroxybenzoate dehydrogenase of siderophore biosynthesis OS=Nocardiopsis sp. JB363; OX = 1434837 GN=BQ8420_03480 PE=4SV=1
MNGIDGAVTVVTGAAGGVGRAVALDLAAHGARVAVVDVDTLGLDQTLHRLTATGHKAFAFTADVTDPIRVESIFDEVEALLGPVSTVVNAAGALATGSVVDCSDQDWRRLIAVNATGVFNVGRAAARRMGPRGHGALVTVASNAAGVPRSGMAAYAASKAAAVAFTKSLGLELAPLGVRCNVVSPGSTDTPMLRTMTPDPEALIDGDPSHFKVGIPLRRLGQPQDVAEAVRFLLGDAARHITMHELYVDGGATLR

SEQ ID NO: 91899 - protein, 257 aa, Nonomuraea sp.
  REGION 1..257: note = tr|A0A4R4WLC2|A0A4R4WLC2_9ACTN 2,3-dihydro-2,3-dihydroxybenzoate dehydrogenase; OS = Nonomuraea sp. KC712 OX=1848329 GN=E1294_28490 PE=4 SV=1
MRNTTGLVTGAAGGIGEAVVRALVAEGVAVAALDANAQALAMVVKELVNEGHVVRGYPVDVSSSVAVDAVVEAAEHELGPISSLVNAAGVLRTGAAVALTDDDWNQTFAVNATGVFHVSRAVARRMVPRRTGAIVTVASNAASTPRWNMAAYAASKAAAAGFTRCLGLEVAKFGIRCNVVAPGSTDTPMLTSLWGEGGDALRACLDGAPEQFRVGIPLGRLAEPADVADAVVFLLSQRAAHITLHDLTVDGGAALGR

SEQ ID NO: 91900 - protein, 258 aa, unidentified
  source 1..258: note = Notoacmeibacter sp.
  REGION 1..258: note = tr|A0A3L7JE22|A0A3L7JE22_9RHIZ 2,3-dihydro-2,3-dihydroxybenzoate dehydrogenase; OS = Notoacmeibacter sp. M2BS9Y-3-1 OX=2448481; GN = D8780_10400 PE=4 SV=1
MTIHPAGLWGLENKLVLVTGAAGGIGLALVKALAREGARVLATDLDIAAIPPNDAIIPRSLDVSNTADVEALVDEVEETLGPIDSGVSLAGALATGLVTETTDDDWRRVFAVNTDGVFHLSRALARRMVKRRTGNIVTVSSNAAGVPRHAMAAYAASKAAATMFTRSLGLELAPHGIRCNIVAPGSTLTPMQTGMWSDADGAKAVIAGSAQTFKAGIPLGKLATPEDVADAVLFLLSDRASHITMADIYVDGGATLRG

SEQ ID NO: 91901 - protein, 258 aa, Oceanobacillus iheyensis
  REGION 1..258: note = tr|Q8CV03|Q8CV03_OCEIH 2,3-dihydro-2,3-dihydroxybenzoate dehydrogenase; OS = Oceanobacillus iheyensis (strain DSM 14371 / CIP 107618 / JCM 11309 / KCTC 3954 / HTE831) O X=221109 GN=dhbA PE=4; SV = 1
MMEKKVAIVTGAAQGMGYEVFHALAVRGYVTIGIDIQEEKLQKIKDIAETDHLAAETFYADVSDSTRVNEIIDQVYKTYGRIDVLVNAAGVLSLGEVTTLSDEDWERTFAVNTNGVFHVSRAVCNRMKENKQGAVVTISSNAASVPRTSMAAYSASKAASLMFTKCLGLEMASHGIRCNIVSPGATDTEMQRAFWKEEADIEKGIKGIPEQYRVGIPLQKIASTTEITEAVLFLLSDSASHITMNNIVVDGGATLGAQ

SEQ ID NO: 91902 - protein, 261 aa, Oceanobacillus profundus
  REGION 1..261: note = tr|A0A417YIV9|A0A417YIV9_9BACI 2,3-dihydro-2,3-dihydroxybenzoate dehydrogenase; OS = Oceanobacillus profundus OX=372463 GN=D1B32_07460 PE=3; SV = 1
MNVSEINGKIAVVTGAAGGMGQIISEKLAENGAVIAAIDTNSQVLKKCVKELQDKGYQATGFSIDISNLDAVEEVVAFIESDVGPIEVLVNAAGMLRLGEIDVLDKEDWNASFAVNATGVFHVSSSVSRRMIPRKSGAIITVSSNAAHMPRMAMAAYGASKAAATMFTKCMGLELAQYNIRCNVISPGSTETSMLKKLWKDEHGAQKTIEGQSEAYRVGIPLGKLGKPKDIAETVLFLVSDHASHITMHDMVIDGGATLGI

SEQ ID NO: 91903 - protein, 277 aa, Oerskovia enterophila
  REGION 1..277: note = tr|A0A163T4J2|A0A163T4J2_9CELL 2,3-dihydro-2,3-dihydroxybenzoate dehydrogenase; OS = Oerskovia enterophila OX=43678 GN=dhbA PE=4 SV=1
MSTRVVLVTGAAGGIGAAVVHAFAAEGYVVVAADLDRPTVPAHTTVPPHGGTAPVTAAAPSTPGTVVPVRLDVTDEQDVARLVRWVEDEVGPLEVLVNAAGVLRPGVVTESSLADWQRMLAVNATGVYLVSRAVARCLSSRRRGAIVTVASNAAGVPRAGMAAYAASKAAASSLTRSLGLELAPFGVRCNVVSPGSTRTPMLAALAGSPGSDDVPVLDEPAEARVVAGAPQDFRLGIPLGRLAEVQDVAAAVVFLASDAARHITVHELVVDGGATLR

SEQ ID NO: 91904 - protein, 85 aa, unidentified
  source 1..85: note = Omnitrophica bacterium
  REGION 1..85: note = tr|A0A136N375|A0A136N375_9BACT 2,3-dihydro-2,3-dihydroxybenzoate dehydrogenase; OS = Omnitrophica bacterium OLB16 OX=1617433 GN=dhbA PE=4; SV = 1
MELKNRGVLITGAGRGLGKVLALSLAYCGCRLGLVSRTEKELNEVARSIQGKKGSAVVLPADITNSAAVQKMVARAEGELGTSMS

SEQ ID NO: 91905 - protein, 251 aa, unidentified
  source 1..251: note = Pacificibacter marinus
  REGION 1..251: note = tr|A0A1Y5TD07|A0A1Y5TD07_9RHOB 2,3-dihydro-2,3-dihydroxybenzoate dehydrogenase; OS = Pacificibacter marinus OX=658057 GN=dhbA PE=3 SV=1
MINLTGKTALITGASRGIGAQTARIFADAGAKVALLARSAQELEALAQDIGPNALALPCDISDSAALEVAVNTARKTLGPIDILVNNAGVIHPIGKMIDMDVEEWSKAIEINLKAVFGAMRLIVPDMVARGGGTVLSVSSGAAHGPVEGWSAYCTSKAGAAMLTRMLDLEERANGIRVLGLSPGTVATEMQREIKASGINAVSQLDWSTHIPADWPAKALLWMCGPDADAFRGQEISLRDETIRRLIGLTT

SEQ ID NO: 91906 - protein, 261 aa, Paenibacillus alvei
  REGION 1..261: note = tr|K5AAA0|K5AAA0_PAEA2 2,3-dihydro-2,3-dihydroxybenzoate dehydrogenase; OS = Paenibacillus alvei (strain ATCC 6344 / DSM 29 / NBRC 3343 / NCIMB 9371 / NCTC 6352) OX=120 6781 GN=dhbA PE=3; SV = 1
MKYSGIEGKVAVVTGAAQGIGKAVSRALAVQGAIVAAVDRNEAGCVSLAAELGTDGYRAAAYPVDVGDSSAVDVTVERIEKELGPIGVLVNVAGILRPGPIETLSDEDWQATFRVNVNGVFYMSRAVVTRMAKRRSGAIVTVGSNASGVPRTYMSAYAASKAATTMFTKCLGLEYARHHIRCNIVSPGSTDTEMQRSLWNGQNGAEAMIAGSPESFRLGIPLGRIAQPSDIADAVVFLASEQARHITMHDMCIDGGATLGC

SEQ ID NO: 91907 - protein, 261 aa, Paenibacillus alvei
  REGION 1..261: note = tr|A0A383RFB8|A0A383RFB8_PAEAL 2,3-dihydro-2,3-dihydroxybenzoate dehydrogenase; OS = Paenibacillus alvei OX=44250 GN=dhbA PE=3 SV=1
MKYSGIEGKVAVVTGAAQGIGEAVARALAVQGAAVAVVDRNEAGCTSLAAELDAGGYHAAAYPVDVSDSTAVNRTVGRIEEELGPIGVLVNVAGILRLGPIETLSDEDWQSTFSVNVNGVFYMSRAVVTLMAKRRSGAIVTVGSNASGVPRTQMSAYAASKAATTMFTKCLGLEYARHHIRCNIVSPGSTDTEMQRSLWNGQNGAEAMIAGSPESFRLGIPLGRIAQPSDIADAVLFLASEQARHITMHDMCIDGGATLGC

SEQ ID NO: 91908 - protein, 262 aa, Paenibacillus dendritiformis
  REGION 1..262: note = tr|A0A4R5YTU4|A0A4R5YTU4_9BACL 2,3-dihydro-2,3-dihydroxybenzoate dehydrogenase; OS = Paenibacillus dendritiformis OX=130049 GN=E2R60_22360; PE = 3 SV=1
MEYAGIKGKVALVTGAAQGIGEAVAQALSGLGAIVAAVDRNAAGVEKLAAELSGAGNLRAAAYPADVGDRSAVDKAVERIEQELGPIEIAVNVAGLLRAGPIESLSDEDWQETFRVNVNGVFYVSRTVVRRMALRGSGSIVTVGSNAAGVPRMHMSAYAASKAAAAMFTKCLGLEYARNNIRCNIVAPGSTDTAMQRALWSGEDSAAAVIDGSPEAFRLGIPLHKLAMPSDIADAVIFLVSDRARHITMHELCVDGGATLGC

SEQ ID NO: 91909 - protein, 261 aa, unidentified
  source 1..261: note = Paenibacillus hemerocallicola
  REGION 1..261: note = tr|A0A5C4SYY2|A0A5C4SYY2_9BACL 2,3-dihydro-2,3-dihydroxybenzoate dehydrogenase; OS = Paenibacillus hemerocallicola OX=1172614 GN=FE784_34055; PE = 3 SV=1
MNHLGIKGKVALVTGAAQGIGEAIARAMAQYGAHVAAVDSNAERLDAVVNDILAEGGRAAAFRLDVRDGSSVEEIVERIEKEIGPIEILVHAAGILRTGPIASLSDEDWSSTFEVNCTGVFRLSRSVMNHMMPRMKGSIVTVGSNAAGVPRMQMSAYAASKAAVTMFTKCMGLELARYRIRCNIVSPGSTDTEMQRSLWKDEQGAEAIIAGHTDSYRLGIPLGKLAAASDIAEAVIFLASDLASHITMHDLCVDGGATLGI

SEQ ID NO: 91910 - protein, 261 aa, Paenibacillus illinoisensis
  REGION 1..261: note = tr|A0A2W0C9J1|A0A2W0C9J1_9BACL Short-chain dehydrogenase-reductase SDR OS=Paenibacillus illinoisensis; OX = 59845 GN=PIL02S_02120 PE=3 SV=1
MSYTGIHGKVALVTGAAQGIGEAVARALAEQGAVVAAVDIREEQLEQLAVDLNHQGHQAAVYPADIANRQSVDDTVQRIEATLGPIGILINAAGVLHTGAVASLSDEEWTRTFDVNTHGVFYMSRAVVRNMAKRQSGTVVTVGSNASGVPRMHMSAYAASKAASTMFTKCLALEYAEQHIRCNIVSPGSTDTPMQRALWQDDHGAQAVIAGSQQAYRLGIPLNRLALPSDIAEAVLFLASDQARHITMHDLCVDGGATLGV

SEQ ID NO: 91911 - protein, 261 aa, Paenibacillus larvae
  REGION 1..261: note = tr|V9W311|V9W311_9BACL 2,3-dihydro-2,3-dihydroxybenzoate dehydrogenase; OS = Paenibacillus larvae subsp. larvae DSM 25430 OX=697284; GN = dhbA PE=3 SV=1
MGLKGFQGKIALVTGAAQGIGETVARELVESGVQVAAVDKKVGLLNELVNDLTTQGGRVKAFPIDVSDSRAVDSTVNQIENEMGPIEILVNIAGVLHVGPIDSLSDADWDEVFSVNSNGVFYVSRSVSRRMMSRRTGSIITVGSNAASVPRMHMAAYASSKAAATMFTKCLGLELAEYGIRCNLVSPGSTETEMQRLLWGDGNGAEKMIAGSQSTYRVGIPLKKLALPSDIAAAVLFLASDQARHITMHNLCVDGGATLGV

SEQ ID NO: 91912 - protein, 261 aa, Paenibacillus larvae; identical to SEQ ID NO: 91911
  REGION 1..261: note = tr|W2E861|W2E861_9BACL 2,3-dihydro-2,3-dihydroxybenzoate dehydrogenase; OS = Paenibacillus larvae subsp. larvae DSM 25719 OX=697286; GN = dhbA PE=3 SV=1

SEQ ID NO: 91913 - protein, 261 aa, Paenibacillus larvae
  REGION 1..261: note = tr|A0A2L1TZM1|A0A2L1TZM1_9BACL 2,3-dihydro-2,3-dihydroxybenzoate dehydrogenase; OS = Paenibacillus larvae subsp. larvae OX=147375 GN=dhbA; PE = 3 SV=1
MGLKGFQGKIALVTGAAQGIGETVARELVESGVQVAAVDKKVGLLNELVNDLTTQGGRVKAFPIDVSDSRAVDSTVNQIENEMGPIEILVNIAGVLHVGPIDSLSDADWDEVFSVNSNGVFYVSRSVSRHMMSRRTGSIITVGSNAASVPRMHMAAYASSKAAATMFTKCLGLELAEYGIRCNLVSPGSTETEMQRLLWGDGNGAEKMIAGSQSTYRVGIPLKKLALPSDIAAAVLFLASDQARHITMHNLCVDGGATLGV

SEQ ID NO: 91914 - protein, 261 aa, Paenibacillus lautus
  REGION 1..261: note = tr|A0A328W905|A0A328W905_PAELA 2,3-dihydro-2,3-dihydroxybenzoate dehydrogenase; OS = Paenibacillus lautus OX=1401 GN=DP091_22245 PE=4 SV=1
MEITGISGKVALVTGAAQGIGEAVARALARQGAVVAACDQKEAELIRLTADLCSSGTQAAAYGANVSCSAEVEEMIGRIEEELGPIEILVNVAGVLRIGGVESLRDEDWQEHFNVNTNGVFYTSRSVVRRMASRNSGAIVTVSSNASKVPRAQMSAYAASKAASTMFTKCLGLEYARHHIRCNVVSPGSTDTGMQRLLWKDDQGAESIIAGSLDDYRVGIPLGRIALPSDIADAVVFLVSDRARHMTMQDVCVDGGATLGC

SEQ ID NO: 91915 - protein, 261 aa, unidentified
  source 1..261: note = Paenibacillus lentus
  REGION 1..261: note = tr|A0A3Q8S626|A0A3Q8S626_9BACL 2,3-dihydro-2,3-dihydroxybenzoate dehydrogenase; OS = Paenibacillus lentus OX=1338368 GN=EIM92_18460 PE=4 SV=1
MEYTGIQGKVALVTGAAQGIGEAVARALASAGAIVAALDLNGEALEGLAAELRAQGCQVSVFVTDVADSHAVEAAVDQVERELGPIEILVNVAGLLRIGSVEALSDEDWAAAFAVNANGVFYVSRSVVKRMAVRKSGSIVTVGSNAARIPRMQMAAYNASKAAAVMFTKCLGLEQATNHIRCNIVSPGSTDTVMQRMLWNDSNGGQSVVAGSPEAFRLGIPLGRIAAPSDIADAVMFLASDRARQITMLDLCIDGGATLGV

SEQ ID NO: 91916 - protein, 263 aa, unidentified
  source 1..263: note = Paenibacillus nuruki
  REGION 1..263: note = tr|A0A1E3KX47|A0A1E3KX47_9BACL 2,3-dihydro-2,3-dihydroxybenzoate dehydrogenase; OS = Paenibacillus nuruki OX=1886670 GN=entA PE=3 SV=1
MLGKKTIFITGAGSGLGKGAALGLAKKGHKVIASVEIIPQVTELREEAKAQGLDIEVLKLDVNKPLDRIQLEKYDFDVYVANAGIGEGGPLAEIPVDNIRQIFDTNVFNSLEMVQIVARQFVAKKKGKIIFVSSIAGLSVTPYLGAYCASKHAVEAMAQALKEELKEFGIQVATINPGPYKTGFNDNMFEQKEKWYDEKTNFTKRADLLKGEKMLAQQFDPQDMIDKMVEVIDAKHHPFRNVYPKPSEEQVKEYQAKIWEETV

SEQ ID NO: 91917 - protein, 70 aa, Paenibacillus polymyxa
  REGION 1..70: note = tr|A0A378XZ56|A0A378XZ56_PAEPO Oxidoreductase; OS = Paenibacillus polymyxa OX=1406 GN=dhbA PE=4 SV=1
MSFEGQVVIVTGAAHGIGKEVAFAYAAQGAKVVFADYNEEEGAAAAAAARNEGHQAIFIPCDVCVRKQIL

SEQ ID NO: 91918 - protein, 261 aa, unidentified
  source 1..261: note = Paenibacillus silvae
  REGION 1..261: note = tr|A0A2W6NF91|A0A2W6NF91_9BACL 2,3-dihydro-2,3-dihydroxybenzoate dehydrogenase; OS = Paenibacillus silvae OX=1325358 GN=DN757_16425 PE=3 SV=1
MSYTGIDGNVAVVTGAAQGIGEAVARLLAQYGAIVALVDQQEAALSQLVSELRSQGHQAVACIADVSDRQAVEDTVQQIEENVGPIGILVNAAGVLHAGTVSELKDEEWMRTFDVNTHGVFYMSRAVVRNMSKRQTGAVVTVGSNAASVPRMHMSAYAASKAASTMFTKCLALEYANQHIRCNIVSPGSTDTPMQRALWQEEDGAEAVIAGSLQTFRLGIPLNRMALPSDIADAVIFLISDQARHITMHNLCVDGGATLGV

SEQ ID NO: 91919 - protein, 261 aa, Paenibacillus sp.
  REGION 1..261: note = tr|H6CGS3|H6CGS3_9BACL Short-chain dehydrogenase/reductase SDR OS=Paenibacillus sp. Aloe-11; OX = 1050222 GN=WG8_1483 PE=3 SV=1
MSDDGIQGKVALVTGAAQGIGAAVARSLAELGATIAAVDQNTEGVSRLVDELVRDGYRATAFPVDVSHRAAIDETVEQIEHQLGPVGILVNVAGVLRMGQVDTLRDSDWTETFAVNTNGVFYISRAVVKHMIPRKSGSIVTVGSNAGAVPRMYMAAYAASKAASAMFTKCLGLEVACHHIRCNVVSPGSTETEMQRSLWSDENGAQAAIDGSPNAYKVGIPLQRLADPADIAAAVVFLASDKSRHITMHDLRIDGGATLGV

SEQ ID NO: 91920 - protein, 261 aa, Paenibacillus sp.
  REGION 1..261: note = tr|A0A2M9N4F6|A0A2M9N4F6_9BACL 2,3-dihydro-2,3-dihydroxybenzoate dehydrogenase; OS = Paenibacillus sp. GM2FR OX=2059268 GN=dhbA PE=3 SV=1
MESTGIRGKVALVTGAAQGIGEAVARALARQGAVVAACDRKEAELIRLTADLCSSGVQAAAYRTDVSCSAEVEAMVERIEEELGPIEILVNVAGVLRIGGVESLRDEDWQAHFNVNTHGVFYTSRSVVRRMASRNSGAIVTVSSNASKVPRAQMSAYAASKAASTMFTKCLGLEYARYHIRCNVVSPGSTDTEMQRLLWKDDQGAVPIIEGAPDSFRVGIPLGKIALPSDIADAVVFLVSDRAGHLTMQDVCVDGGATLGC

SEQ ID NO: 91921 - protein, 269 aa, Paenibacillus sp.
  REGION 1..269: note = tr|F5LRL7|F5LRL7_9BACL 2,3-dihydroxybenzoate-2,3-dehydrogenase OS=Paenibacillus sp. HGF7 OX=944559 GN=HMPREF9413_1211 PE=4 SV=1
MKESPFAGAPYTGISGKVAVVTGAAQGIGEAAAAVLAGLGAVIAAVDLQGEKVERSAEALASSGASAAAYAADVSDSRSVEEVIARIEREQGPVDILVHAAGVLQHGTGVTLGDEEWERTFAVNTTGAFYVCRSVISRMSKRRRGSIVLIGSNAGTVPRYGMSAYAASKAAAAMMLKCLGLEHAAEGIRCNIVSPGSTDTPMQRGMWEDESGEFKTISGSPELYKLGIPLGKLATPEDIAWAAAFLSSDQAGHITLHDIRIDGGATLGR

SEQ ID NO: 91922 - protein, 262 aa, Paenibacillus sp.
  REGION 1..262: note = tr|A0A3P3U5G4|A0A3P3U5G4_9BACL 2,3-dihydro-2,3-dihydroxybenzoate dehydrogenase; OS = Paenibacillus sp. KCOM 3021 OX=2490856 GN=EHV15_20110; PE = 3 SV=1
MEYEGIKGKVALVTGAAQGIGEAVARALAGLGAIVAAIDRNAAGVEKLAAELNGTGNLRAAPYPADVGDRAAVEEAVERIEQELGPIEIVVNVAGVLRAGRIESLSDEDWQETFRVNVNGVFYVSRAAVGRMALRGSGSIVTVGSNAAGVPRMHMSAYAASKAAAAMFTKCLGLEYARNNIRCNIVAPGSTDTAMQRVLWSGEDGAEAVIAGSPESFRLGIPLHKLAMPSDIADAVSFLVSDRARHITMHELYVDGGATLGC

SEQ ID NO: 91923 - protein, 256 aa, Paenibacillus sp.
  REGION 1..256: note = tr|A0A559J486|A0A559J486_9BACL 2,3-dihydro-2,3-dihydroxybenzoate dehydrogenase; OS = Paenibacillus sp. N4 OX=2590547 GN=FPZ44_11720 PE=3 SV=1
MEGKVALVTGAAQGIGEAVVRALAEQGVRIAAVDRNEAGLNSLVVDLTSIGAKVFPYTVDVGSSAEVEAAVEQIERALGPIDILVNVAGVLRIGAIGSLSDEDWQSHFTVNTNGVFYVSRAVVCRMATRKAGAIVTVSSNASKVPRTQMSAYAASKAASTMFTKCLALEYAKDNIRCNVVSPGSTDTEMQRLLWKDENGAQPIIDGSLESYRVGIPLGKIAAPVDIADSVLFLLSSRAGHITMHDVCVDGGATLGC

SEQ ID NO: 91924 - protein, 261 aa, Paenibacillus sp.
  REGION 1..261: note = tr|A0A544VGI6|A0A544VGI6_9BACL 2,3-dihydro-2,3-dihydroxybenzoate dehydrogenase; OS = Paenibacillus sp. SDF0028 OX=2133754 GN=C7Y44_05785; PE = 3 SV=1
MKYSGIEGKVAVVTGAAQGIGEAVARALAVQGATVAVVDRNEAGCTSLAAELNAGGYHAAAFPVDVSDSAAVNRTVERIEEELGSIGVLANVAGILRLGPIETLSDEDWQSTFSVNVNGVFYMSRAVVTRMAKRRSGAIVTVGSNASGVPRTHMSAYAASKAATTMFTKCLGLEYANHHIRCNIVSPGSTDTEMQRSLWNGQNGAEAMISGSPESFRLGIPLGRIAQPSDIADAVLFLASEQARHITMHDMCIDGGATLGC

SEQ ID NO: 91925 - protein, 261 aa, Paenibacillus taichungensis
  REGION 1..261: note = tr|A0A329QZJ3|A0A329QZJ3_9BACL 2,3-dihydro-2,3-dihydroxybenzoate dehydrogenase; OS = Paenibacillus taichungensis OX=484184 GN=DC345_11370; PE = 3 SV=1
MSYTGVNGKVAIVTGAAQGIGEAVARLLAEQGAIVAAFDVREDQLNQLVTDLHSQGHQATACPMDISNRQSVEDAIQRIEKTLGPIGILVNAAGVLYTGAVSELRDEEWTRTFDVNTHGVFYMSRAVVRYMAERQSGAIVTVGSNASGVPRMHMSAYVASKAASTMFTKCLALEYASDHIRCNIVSPGSTDTDMQRALWADEQGAEAVIAGSPQAYRLGIPLNRLALPSDIADSVLFLVSDQARHITMHKLCVDGGATLGA

SEQ ID NO: 91926 - protein, 262 aa, Paenibacillus thiaminolyticus
  REGION 1..262: note = tr|A0A378XB54|A0A378XB54_PANTH Short-chain dehydrogenase/reductase SDR OS=Paenibacillus thiaminolyticus OX=49283 GN=dhbA PE=3 SV=1
MEYPGIKGKVALVTGAAQGIGEAVARSLAGLGAIVAAVDQNAAGVEKLAAELRGAGNYRAAAYPADVGDRAAVEEAVERIEQELGPIEIVVNVAGLLRAGPIESLTDEDWQETFRVNVNGVFYVSRAAVRHMALRGSGAIVTVGSNAAGVPRMHMSAYAASKAAAAMFTKCLGLEYARNHIRCNIVAPGSTDTDMQRALWSGNDGAAAVISGSPEAFRLGIPLRKLAMPSDIADAVIFLVSDRARHITMHELCVDGGATLGC

SEQ ID NO: 91927 - protein, 260 aa, unidentified
  source 1..260: note = Paenibacillus whitsoniae
  REGION 1..260: note = tr|A0A3S0BIM0|A0A3S0BIM0_9BACL 2,3-dihydro-2,3-dihydroxybenzoate dehydrogenase; OS = Paenibacillus whitsoniae OX=2496558 GN=EJQ19_22865 PE=4; SV = 1
MTNELEGRVALVTGAAQGIGEAVVRALSAQGATVAAVDKQAEPLQRLCGEMVGQGALVKAYPLNLKDHAAVPQVVERVEAELGPIDILVHAAGVLRMGALSSYADEDWNELLAVNVSGVFHLSRAVGTRMIPRRRGAIVTVSSNAAAVPRMGMGAYATTKAAVTMLTKCLALELAEYGIRCNIVSPGSTDTPMLRGMWQDEQGKQATLDGSLPSYRIGIPLRKLATPEDIADAVRFLVSDRAGHVTMHDLRVDGGATLGV

SEQ ID NO: 91928 - protein, 261 aa, Paenibacillus xylanexedens
  REGION 1..261: note = tr|A0A3N6BX28|A0A3N6BX28_9BACL 2,3-dihydro-2,3-dihydroxybenzoate dehydrogenase; OS = Paenibacillus xylanexedens OX=528191 GN=EDO6_04819 PE=4; SV = 1
MSYTGIDGKVAVVTGAAQGIGEAVARLLAQNGAFVALVDRQESLLNQLVTDLHSQGHQATAHVADISNRQAVEDTVQRIEETVGPIGILVNAAGVLHTGAVSELTDEEWTKTFDVNTHGVFYMSRAVVRNMAERQTGAVVTVGSNASGVPRMHMSAYAASKAASTIFTKCLALEYADRHIRCNIVSPGSTDTPMQRAMWQDEHGAEAVIAGSPQTFRLGIPLNRMALPEDIAEAVVYLVSDQARHITMHDLCVDGGATLGT

SEQ ID NO: 91929 - protein, 242 aa, unidentified
  source 1..242: note = Paeniglutamicibacter gangotriensis
  REGION 1..242: note = tr|M7MSQ8|M7MSQ8_9MICC 2,3-dihydroxybenzoate-2,3-dehydrogenase; OS = Paeniglutamicibacter gangotriensis Lz1y OX=1276920; GN = ADIAG_02485 PE=4 SV=1
MADLTDLTVLIAGATSAAGVAAAHALCQAGATVLAAGSNAGRLNEALPFVHGRYEVDLADHAAVTELRALIDVERGPIDGLLHLVGGWRGGKALAGQSDDDYAFLHTQVITTLRNTTRVFRDDLVASKCGRVGIVSATAVDAPSGSNANYTTAKAGAEAWMRSVAAELRTAQSGHKTDPVPQRAAALIWVIKAFTNAEARAAKPEAKTAGFTDVTALGQAAVQLFTSDAADLNGARIHLPTL

SEQ ID NO: 91930 - protein, 251 aa, Palleronia marisminoris
  REGION 1..251: note = tr|A0A1Y5TI37|A0A1Y5TI37_9RHOB 2,3-dihydro-2,3-dihydroxybenzoate dehydrogenase; OS = Palleronia marisminoris OX=315423 GN=dhbA PE=4 SV=1
MKLTGFEGRRALVTGAAGGIGSALATALAEAGASVTATDLESALTGVDRKDGIAWQPLDVTDPAAVDRLVGEGEAFDLGAHAAGILVTAPLLDTTVEDWQRVFDINVNGTFHVTRALGRRMAARGRGAIVAIGSNAAGIPRTGMGAYPATKAAVAMHMRCLGLELAAHGVRCNLVAPGSTLTPMQTGMWADETGAERVIAGDPATYRTGIPLRKLATPEDIAMAAMFLLSEQAGHVTMADLYVDGGATLRT

SEQ ID NO: 91931 - protein, 237 aa, Pandoraea apista
  REGION 1..237: note = tr|A0A0G4JLW2|A0A0G4JLW2_9BURK 2,3-dihydro-2,3-dihydroxybenzoate dehydrogenase; OS = Pandoraea apista OX=93218 GN=entA PE=4 SV=1
MFNFDGQRVLVIGGSSGIGRAAAQAFAKAGAAVTIASRSQSRLDEALATIGTTARAVVLDMGDASAVERFFADHAPWQHVVVSAAQTPTGQVRKLSLDDAHAAFDSKFWGSYHVARYARIEDGGSLTLTSGYLSVRPSTSSVVQGAINAAVEALGRGLALELSPVRVNTVSPGLTVTPLWNKLAEADREAMYRNAAERLPARRVVAAEDVANTILYLAGTPSATGSTVLIDAGGAIA

SEQ ID NO: 91932 - protein, 237 aa, Pandoraea pnomenusa
  REGION 1..237: note = tr|A0A378YFK3|A0A378YFK3_9BURK 2,3-dihydro-2,3-dihydroxybenzoate dehydrogenase; OS = Pandoraea pnomenusa OX=93220 GN=entA PE=4 SV=1
MFDFEGQRVLVIGGSSGIGRAAAQAFAKAGAAVTIASRSQAKLDAALATIGSTARAVVLDTGNAAAVERFFEEHAPWQHVVISAAQTPTGQVRKLSLEDAHTAFDSKFWGTYHVARHARIEAGGSLTLTSGYLSVRPSTASVVQGAINAAVEALGRGLALELSPVRVNTVSPGLTVTPLWNKMAETDREAMYRNAAERLPARRVVAADDVANAILYLAGTPSATGSTVLIDAGGAIA

SEQ ID NO: 91933 - protein, 237 aa, Pandoraea pulmonicola
  REGION 1..237: note = tr|A0A378ZBQ5|A0A378ZBQ5_9BURK 2,3-dihydro-2,3-dihydroxybenzoate dehydrogenase; OS = Pandoraea pulmonicola OX=93221 GN=entA PE=4 SV=1
MFNFEGQRVLVIGGSSGIGRAAAQAFARAGAAVTIASRNQAKLDEALATIGNTARAAVLDISDAAAVERFFADHASWQHVVMSAAQTPTGQVRKLPLDDAHAAFDSKFWGTYHVARFARIEDGGSLTLTSGYLSVRPSTSSVVQGAINAAIEALGRGLALELSPVRVNTVSPGLTVTPLWNKLSEADREAMYRNAAERLPARRVVAAEDVANTILYLAGTPSATGSTVLIDAGGAIA

SEQ ID NO: 91934 - protein, 237 aa, Pandoraea sputorum
  REGION 1..237: note = tr|A0A239SH79|A0A239SH79_9BURK 2,3-dihydro-2,3-dihydroxybenzoate dehydrogenase; OS = Pandoraea sputorum OX=93222 GN=entA PE=4 SV=1
MFNFEGQRVLVIGGSSGIGRAAAQAFAKAGAVVTIASRSQAKLDEALATIGSTARAVVLDTGDVAAVERFFADHAPWQHVVISAAQTPTGQVRKLSLDDAHAAFDSKFWGTYHVAKFARIEDGGSLTLTSGYLSVRPNTSSVVQGAINAAVEALGRGLALELSPVRVNTVSPGLTVTPLWNKLAEADREAMYHNAAQRLPARRVVAAEDVANTILYLAGTPSATGSTVLIDAGGAIA

SEQ ID NO: 91935 - protein, 252 aa, Pantoea anthophila
  REGION 1..252: note = tr|A0A506PBC2|A0A506PBC2_9GAMM 2,3-dihydro-2,3-dihydroxybenzoate dehydrogenase OS=Pantoea anthophila OX=470931 GN=dhbA PE=4 SV=1
MSHTFDFSGRVVWVTGAGQGIGYQSALAFHRAGAQVEAFDLQFARQDYPFRCHRLDVADPDQVETICQRVLATQPRIDVLVNAAGILRVGATDTLSFADWQACLNVNAGGAFNLFQQTLPRFRQQRAGAIVTVASNAAHAPRIGMSAYGASKAALRSLCLTVGLEMAPFGVRCNIVSPGSTDTAMQRSLWQTPGGEQEMIAGFPDQFKLGIPLGKIAQPQEIAATVLFLASDLASHVTLQDIVVDGGATLGA

SEQ ID NO: 91936 - protein, 252 aa, Pantoea dispersa
  REGION 1..252: note = tr|A0A518X974|A0A518X974_9GAMM 2,3-dihydro-2,3-dihydroxybenzoate dehydrogenase OS=Pantoea dispersa OX=59814 GN=dhbA PE=4 SV=1
MSAVFDFQGKTVWVTGAGKGIGYHTACAFQQAGAQVIGFDRCFDQAAYPFVTETLDVADPDAVQRVCQRLLAAQPRLDVLVNAAGILRTGSTETLSFADWQACLAVNAGGAFNLFQQTLPRFRQQRAGAIVTVASNAAHAPRLGMSAYGASKAALRSLCQTVGLEMAPCGVRCNLVSPGSTDTDMQRSLWHTADAEQATINGFPDQYKLGIPLRKIAQPQEIVNTILFLASDLASHVVLQDIVVDGGATLGA

SEQ ID NO: 91937 - protein, 252 aa, unidentified
  source 1..252: note = Pantoea rodasii
  REGION 1..252: note = tr|A0A0B1RDZ1|A0A0B1RDZ1_9GAMM 2,3-dihydroxybenzoate-2,3-dehydrogenase OS=Pantoea rodasii; OX = 1076549 GN=QU24_01155 PE=4 SV=1
MSASFDFSGKIVWVTGAGKGIGYHTALAFHQAGAKVIGFDLRFDQAEYPFTTQVMDVANAAEVKAVCQRLLADQPHLDVLVNGAGILRIGSTEELAFEDWQACLAVNAGGAFNMFQQTLPVFRQQRAGAIVTIASNAAHAPRLGMSAYGASKAALRSLCLTVGLEMAPLGVRCNIVSPGSTDTDMQRSLWHTPEAEQEMINGFQDQYKLGIPLRKIAKPQEIVNNILFLASDLASHVVLQDIVVDGGATLGS

SEQ ID NO: 91938 - protein, 252 aa, Pantoea sp.
  REGION 1..252: note = tr|A0A0F5XZM5|A0A0F5XZM5_9GAMM 2,3-dihydroxybenzoate-2,3-dehydrogenase OS=Pantoea sp. 3.5.1 OX=1522060 GN=EP46_11430 PE=4 SV=1
MSHSFDFSGKIVWITGAGQGIGYHTALAFHQAGAQVEAFDQRFHGHDYPFPCHTLDVSDPDQVKTLCQRLLATQPRIDVLVNAAGILRIGATDELSFTDWQACLNVNAGGAFNLFQQTLPVFRQQRAGAIVTIASNSAHAPRIGMSAYGASKAALRSLCLTVGLEMAPYGVRCNIVSPGSTDTDMQRSLWHTPTGEQEMIAGFPDQFKLGIPLGKIAQPQEIAANVLFLASDLASHVTLQDIVVDGGATLGA

SEQ ID NO: 91939 - protein, 252 aa, Pantoea sp.
  REGION 1..252: note = tr|A0A0F3M0W8|A0A0F3M0W8_9GAMM 2,3-dihydroxybenzoate-2,3-dehydrogenase OS=Pantoea sp. BL1; OX = 1628190 GN=VH86_12150 PE=4 SV=1
MSASFDFNGKFVWVTGAGKGIGYHTALAFHHAGAQVIGFDLRFDQPDYPFATQVLDVANAAEVKEVCQRLLAEQPRLDVLVNGAGILRVGSTEALAFEDWQACLAVNAGGAFNMFQQTLPVFRQQRAGAIVTIASNAAHAPRLGMSAYGASKAALRSLCLTVGLEMAPFGVRCNIVSPGSTDTDMQRSLWHTPEAEQEMINGFPDQYKLGIPLRKIAKPQEIVNNVLFLASDLASHVVLQDIVVDGGATLGS

SEQ ID NO: 91940 - protein, 252 aa, Pantoea sp.
  REGION 1..252: note = tr|A0A519R754|A0A519R754_9GAMM 2,3-dihydro-2,3-dihydroxybenzoate dehydrogenase OS=Pantoea sp. OX=69393 GN=dhbA PE=4 SV=1
MSHTFDFSGKIVWVTGAGQGIGYHTALAFHQAGAQVEAFDQRFKGHDYPFPCHTMDVADPAQVKTICQRVLAAQPRIDVLVNAAGILRIGATDELSFADWQACLNVNAGGAFNLFQQTLPRFREQRAGAIVTVASNSAHAPRIGMSAYGASKAALRSLCQTVGLEMAPYGVRSNIVSPGSTDTDMQRSLWHTPTGEQEMIAGFPDQFKLGIPLGKIAQPQEIAATVLFLASDLASHVTLQDIVVDGGATLGA

SEQ ID NO: 91941 - protein, 252 aa, Pantoea sp.
  REGION 1..252: note = tr|A0A555ZJT0|A0A555ZJT0_9GAMM 2,3-dihydro-2,3-dihydroxybenzoate dehydrogenase OS=Pantoea sp. paga OX=2597519 GN=dhbA PE=4 SV=1
MSHTFDFSGKIVWVTGAGQGIGYHTALAFHQAGAQVEAFDQRFKGHDYPFPCHMMDVADPAQVKTICQRVLAAQPRIDVLVNAAGILRIGATDELSFADWQACLNVNAGGAFNLFQQTLPRFREQRAGAIVTVASNSAHAPRIGMSAYGASKAALRSLCQTVGLEMAPYGVRCNIVSPGSTDTDMQRSLWHTPTGEQEMIAGFPDQFKLGIPLGKIAQPQEIAATVLFLASDLASHVTLQDIVVDGGATLGA

SEQ ID NO: 91942 - protein, 252 aa, Pantoea sp.
  REGION 1..252: note = tr|A0A4S3L9I4|A0A4S3L9I4_9GAMM 2,3-dihydro-2,3-dihydroxybenzoate dehydrogenase OS=Pantoea sp. R102 OX=2507583 GN=dhbA PE=4 SV=1
MSACFDFSGKIVWVTGAGKGIGYHTALAFHQAGAQVTGFDLHFGQDDYPFATCQLDVADSAAVRDCCQSLLASQPRLDILVNGAGILRIGSTDALSFADWQACLAVNAGGAFNLFQQTLPVFRQQRAGAIVTIASNAAHAPRLGMSAYGASKAALRSLCQTVGLEMAPYGVRCNIVSPGSTDTDMQRSLWHTPEAEQEMINGFPDQYKLGIPLRKIAQPQEIVNNILFLASDLASHVVLQDIVVDGGATLGA

SEQ ID NO: 91943 - protein, 252 aa, Pantoea sp.
  REGION 1..252: note = tr|A0A3N4PYG3|A0A3N4PYG3_9GAMM 2,3-dihydro-2,3-dihydroxybenzoate dehydrogenase OS=Pantoea sp. RIT388 OX=1869313 GN=dhbA PE=4 SV=1
MSHSFDFSGKIVWVTGAGQGIGYHTALAFHAAGAQVQGFDRRFHDSDYPFACHTLDVADPDQVKTVCQRLLAEQTRLDVLVNGAGILRIGATDEISFADFQACLAVNVGGAFNMFQQTLPLFRQQRAGAIVTIASNSAHAPRIGMSAYGASKAALRSLCLTVGLEMAPFGVRCNIVSPGSTDTEMQRSLWHTPTAEQEMIDGFPDQYKLGIPLRKIAQPQEIAHNVLFLASDLASHVVLQDIVVDGGATLGA

SEQ ID NO: 91944 - protein, 252 aa, Pantoea sp.
  REGION 1..252: note = tr|A0A432B899|A0A432B899_9GAMM 2,3-dihydro-2,3-dihydroxybenzoate dehydrogenase OS=Pantoea sp. YU22 OX=2497684 GN=dhbA PE=4 SV=1
MSQHFDFSGKIVWVTGAGQGIGYHTALAFHAAGAQVQGFDLRFHDHEYPFACHRLDVADPEQVKATCQPLLAQQPRLDVLVNGAGILRIGATDEISFEDFQACLAVNVGGAFNMFQQTLPRFRQQRAGAIVTIASNSAHAPRIGMSAYGASKAALRSLALTVGLEMAPYGVRCNIVSPGSTDTEMQRSLWHTPTAEQEMIDGFPDQYKLGIPLRKIARPQEIAHNVLFLASDLASHVVLQDIVVDGGATLGA

SEQ ID NO: 91945 - protein, 252 aa, Pantoea vagans
  REGION 1..252: note = tr|E1SC62|E1SC62_PANVC 2,3-dihydro-2,3-dihydroxybenzoate dehydrogenase OS=Pantoea vagans (strain C9-1) OX=712898 GN=entA PE=4 SV=1
MSHVSDFSGKIVWVTGAGQGIGYHTALAFHQAGAQVEAFDLRFQGHDYPFSCHIMDVADPAQVKSVCQRVLAAQPRIDVLVNAAGILRTGATDALSFADWQACLNVNAGGAFNLFQQTLPRFREQRAGAIVTVASNSAHAPRIGMSAYGASKAALRSLCLTVGLEMAPYGVRCNIVSPGSTDTDMQRSLWHTPTGEQEMIAGFPDQFKLGIPLGKIAQPQEIAATVLFLASDLASHVTLQDIVVDGGATLGA

SEQ ID NO: 91946 - protein, 252 aa, Pantoea vagans; identical to SEQ ID NO: 91937
  REGION 1..252: note = tr|A0A0U3UTI1|A0A0U3UTI1_9GAMM 2,3-dihydroxybenzoate-2,3-dehydrogenase OS=Pantoea vagans; OX = 470934 GN=LK04_16505 PE=4 SV=1

SEQ ID NO: 91947 - protein, 258 aa, Paracoccus sp.
  REGION 1..258: note = tr|A0A418T7J2|A0A418T7J2_9RHOB 2,3-dihydro-2,3-dihydroxybenzoate dehydrogenase; OS = Paracoccus sp. 1011MAR3C25 OX=1675788 GN=D3P04_00480; PE = 4 SV=1
MKLEGFSNRAAFVTGAAGGIGLALVAALHAAGARVFATDIPEALDGLLEWDSNETVHWHRLDVSDPVAVADCVALAEETVGPLSLAVHAAGILSTTPVLDLTPAEWERVMSVNAGGCFNVLQALGRVMLPRGKGSIVVVGSNAAGVPRQNMAAYAASKAAIAMLTRCVGLELAGHGIRCNILAPGSTLTPMQTGMWADESGAAKVIAGDPASYRTGIPLGKLAAPEDIAAAAMFLLSDQAGQITMTDLYVDGGATLRA

SEQ ID NO: 91948 - protein, 256 aa, Paracoccus yeei
  REGION 1..256: note = tr|A0A386UHN6|A0A386UHN6_9RHOB 2,3-dihydro-2,3-dihydroxybenzoate dehydrogenase of siderophore biosynthesis OS=Paracoccus yeei OX=147645; GN = PY32053_00491 PE=4 SV=1
MRLTGFQDRTAIVTGAAGGIGRSVVAALVEAGARVIATDTEAALQAAPVPGAENRALDVRDAEATEALVAGVEAAHGPLALGVHAAGVLGIAPILDMAPQEWDRVMGVNATGTFNVTRAFGRAMARQGRGAIVVVSSNAAGIPRLNMGAYAASKAAATMLVRCLGLELAAQGVRCNIVAPGSTLTPMQTGMWAEDGGAGERAVIEGSLEAYRTGIPLKKLATPEDIAGAVMFLLSDQAGHVTMADLYVDGGATMRA

SEQ ID NO: 91949 - protein, 261 aa, unidentified
  source 1..261: note = Parageobacillus thermoglucosidasius
  REGION 1..261: note = tr|A0A369XEB5|A0A369XEB5_PARTM 2,3-dihydro-2,3-dihydroxybenzoate dehydrogenase; OS = Parageobacillus thermoglucosidasius OX=1426; GN = DV713_02370 PE=3 SV=1
MEHWGLQGKIALVTGAAQGIGEAVTRSFVKHGVSVAAVDRNGERLAALVSDLQSNGYDVQAFCADVANSAEIDEIVAQIEDNMGPIEILVNVAGILRTGLIESFMDEDWEEVFKVNTAGVFYVSRSVSRRMIPRRSGAIVTVSSNAATIPRMFMAAYAASKAAATMFTKCLGLELARYHIRCNVVSPGSTETEMQRVLWTDENGANKVITGSMEEFRLGIPLQKLAQPSDIADAVLFLVSEQSRHITMHDLRVDGGATLDA

SEQ ID NO: 91950 - protein, 256 aa, unidentified
  source 1..256: note = Pectobacterium aquaticum
  REGION 1..256: note = tr|A0A3R8NM38|A0A3R8NM38_9GAMM 2,3-dihydro-2,3-dihydroxybenzoate dehydrogenase; OS = Pectobacterium aquaticum OX=2204145 GN=dhbA PE=4 SV=1
MMNKAQPLQFDFRGKTVWVTGAASGIGESIARQFVALGANVIGFDRAFRHDDHPFSCVTLDISEPDSVAAVCRQQLAETGLDVLVNAAGILRLGDIDALSVDDWHQCINVNASGAFYLLNALVPHFKQQRRGAIVCVGSNAAHVPRMQMAAYCASKAALTSLSHCAGLELAPYGVRCNLVSPGSTDTPMQRGMWHSADAEQRTIAGFPDQYKLGIPLGKIAQPEEIANTVVFLASDLASHITMQDVVVDGGATLTA

SEQ ID NO: 91951 - protein, 261 aa, Pectobacterium atrosepticum
  REGION 1..261: note = tr|Q6D9Y2|Q6D9Y2_PECAS Enterobactin synthetase component A (2,3-dihydro-2,3-dihydroxybenzoate dehydrogenase) OS=Pectobacterium atrosepticum (strain SCRI 1043 / ATCCBAA-672) OX=218491 GN=entA PE=4 SV=1
MMNKAQPLQFDFSGQTVWVTGAASGIGESIARQFVALGANVIGFDRAFQHNASPYNDRPFRCVTLDISEPNSVATVCRQQLAETGLDVLVNAAGILRLGDIDALSVDDWYQCINVNASGAFYLLNALVPHFKQQRRGAIVCVGSNAAHVPRVQMAAYCASKAALTSLSHCAGLELAPYGVRCNLVSPGSTDTPMQRGMWHSADAEQRTIAGFPDQYKLGIPLGKIAQPEEIANTVVFLASDLASHITMQDVVVDGGATLTA

SEQ ID NO: 91952 - protein, 256 aa, Pectobacterium carotovorum
  REGION 1..256: note = tr|A0A419AQP0|A0A419AQP0_PECCA 2,3-dihydro-2,3-dihydroxybenzoate dehydrogenase; OS = Pectobacterium carotovorum OX=554 GN=dhbA PE=4 SV=1
MMNKAQPLQFDFSGQTVWVTGAASGIGESIARQFVALGANVIGFDRAFRHYDHPFTCVTLDISEPDSVAAVCRQQLAETGLDVFVNAAGILRLGDIDALSVDDWHQCINVNASGAFYLLNALVPHFKQQRRGAIVCVGSNAAHVPRLQMAAYCASKAALTSLSHCAGLELAPYGVRCNLVSPGSTNTPMQRGMWHSADAEQRTIAGFPDQYKLGIPLGKIAQPEEIANTVVFLASDLASHITMQDVVVDGGATLTA

SEQ ID NO: 91953 - protein, 256 aa, Pectobacterium carotovorum
  REGION 1..256: note = tr|A0A518VP29|A0A518VP29_PECCC 2,3-dihydro-2,3-dihydroxybenzoate dehydrogenase; OS = Pectobacterium carotovorum subsp. carotovorum OX=555; GN = dhbA PE=4 SV=1
MMNKAQPLQFDFSGKTVWVTGAASGIGESIACQFVALGANVIGFDRAFRHNDYPFRGVTLDISEPDSVAAVCRQQLAETGLDVLVNAAGILRLGDIDALSVDDWHQCINVNASGAFYLLNALVPHFKQQRRGAIVCVGSNAAHVPRLQMAAYCASKAALASLSHCAGLELAPYGVRCNLVSPGSTDTPMQRGMWHSAGAEQRTIAGFPDQYKLGIPLGKIAQPEEIANTVVFLASDLASHITMQDVVVDGGATLTA

SEQ ID NO: 91954 - protein, 256 aa, unidentified
  source 1..256: note = Pectobacterium polaris
  REGION 1..256: note = tr|A0A3A4A0L7|A0A3A4A0L7_9GAMM 2,3-dihydro-2,3-dihydroxybenzoate dehydrogenase; OS = Pectobacterium polaris OX=2042057 GN=dhbA PE=4 SV=1
MMNKAQPLQFDFSGQTVWVTGAASGIGESIARQFVALGATVIGFDRQFLHQDHPFTCVTLDISEPDSVAAVCRRQLAETGLDVLVNAAGILRLGDIDALSVDDWHQCINVNASGAFYLLNALVPHFKQQRRGAIVCVGSNAAHVPRLQMAAYCASKAALTSLSHCAGLELAPYGVRCNLVSPGSTDTPMQRGMWHSADAEQRTIAGFPDQYKLGIPLGKIAQPEEIANTVVFLASDLASHITMQDVVVDGGATLTA

SEQ ID NO: 91955 - protein, 256 aa, unidentified
  source 1..256: note = Pectobacterium polonicum
  REGION 1..256: note = tr|A0A4U7KD36|A0A4U7KD36_9GAMM 2,3-dihydro-2,3-dihydroxybenzoate dehydrogenase; OS = Pectobacterium polonicum OX=2485124 GN=dhbA PE=4 SV=1
MMNKAKPLQFDFSGKTVWVTGAASGIGESIARQFVALGANVIGFDRAFRHDDHPFSCVTLDISEPDSVAAVCRQQLAETGLDVLVNAAGILRLGDIDALSVDDWHQCINVNASGAFYLLNALVPHFKQQRRGAIVCVGSNAAHVPRMQMAAYCASKAALTSLSHCAGLELAPYGVRCNLVSPGSTDTPMQRGMWHSADAEQRTIAGFPDQYKLGIPLGKIAQPEEIANTVVFLASDLASHITMQDVVVDGGATLTA

SEQ ID NO: 91956 - protein, 265 aa, Pelagibacterium sp.
  REGION 1..265: note = tr|A0A369W3A5|A0A369W3A5_9RHIZ 2,3-dihydro-2,3-dihydroxybenzoate dehydrogenase; OS = Pelagibacterium sp. XYN52 OX=2282655 GN=DVH29_14630; PE = 4 SV=1
MNTAPNSLRPSGIAGKIAFVTGAGSGIGAAVARGLHAEGARVVATDIAPGGIERLASELGPALRCLTLDISDSAAVDAAIAEIEQSWGPIDLGVSVAGILATDLVTETSDETWKRVFDVNTHGVFHVARALAGRMQARRRGALVTVSSNAASVPRHGMAAYAASKAATSMFMRCLGLELAPFGIRCNTVAPGSTLTPMQTGMWADESGSQKVIAGSLETYKNGIPLGKLATPEEVADAVLFLLSDRASHITMANLMIDGGATLSA

SEQ ID NO: 91957 - protein, 261 aa, unidentified
  source 1..261: note = Pelagicola litorisediminis
  REGION 1..261: note = tr|A0A1Y5SIM1|A0A1Y5SIM1_9RHOB 2,3-dihydro-2,3-dihydroxybenzoate dehydrogenase; OS = Pelagicola litorisediminis OX=1312363 GN=dhbA PE=4 SV=1
MWELGLSGRAIVTGAGQGIGRAIALQLLAAGCHVQAIGRSGEKLLTLADEAKVPADQVLATALDIQDTAAVAQTLAKSQADLGPPRYLVNSAGVLKSSRLLDTPEDALANTIAINLTATVVMSQIVARQMIEAGQGAIVTIGSNSGTTPRLLLGGYPASKAGLEMAMKCLGLELSEYGIRCNIVSPGSTDTPMQAAYQGDTKSRERVLKGDTGSWRLGIPLGRMAQPEDVADLVLFLLSDRARHITMENIVIDGGGTLGAR

SEQ ID NO: 91958 - protein, 261 aa, Pelosinus fermentans
  REGION 1..261: note = tr|I9DMY0|I9DMY0_9FIRM 2,3-dihydro-2,3-dihydroxybenzoate dehydrogenase; OS = Pelosinus fermentans JBW45 OX=1192197 GN=JBW_01670 PE=3; SV = 1
MNYLKMKGKIALVTGGAQGIGESIVRALTEAGAVVAMLDHNAAKLNSLVNELKSQGCNVEAFLVDVSDSKAVNTVVDLIECNIGPIDILINVAGVLRMGLISSLSDQDWEKTFAVNSRGVFNVSRSVSKYMIPRQKGSIVVVGSNAAKVPRISMAAYAASKAAATMFTKCLGLELAQYNIRCNIVSPGSTDTEMQWSLWKDENGARAVIAGTPEAFKIGIPLKKIAAPSDIADAVLFLASDRANHITMLDLCVDGGATLGV

SEQ ID NO: 91959 - protein, 232 aa, unidentified
  source 1..232: note = Phaeobacter italicus
  REGION 1..232: note = tr|A0A0H5CYW1|A0A0H5CYW1_9RHOB 2,3-dihydro-2,3-dihydroxybenzoate dehydrogenase; OS = Phaeobacter italicus OX=481446 GN=entA PE=4 SV=1
MHKRILIIGGTSGVGAELAKHYVNAGHDVWITGRRRPEKTEATFLPLNISADPKQLAQDLDLLLADIGKLHTLIFAAGYLQRGHIDDLTDDDLATMVNTGLLAPMLLVQRLKREAIGPLKVILISSSSQYTPREREPAYSATKAAMGMLGASLARDPDLGKVLVVAPSGIATDFWDGSGEDTRTMLDPHWVSNQIVDLSSGPFKYKYAKILRHPARVEVVECLNNQMEPATP

SEQ ID NO: 91960 - protein, 226 aa, Photobacterium damselae
  REGION 1..226: note = tr|A0A2T3QQ02|A0A2T3QQ02_9GAMM 2,3-dihydro-2,3-dihydroxybenzoate dehydrogenase; OS = Photobacterium damselae OX=38293 GN=dhbA PE=4 SV=1
MQIAQSVVVITAAGSAIGRAMAMHFSQLGAHIALIDTDASHLQTTLECCQTLKNPCHGYLIKDLTEANIHQIGLKVLQDFGSIDILVNCWQGIVLPNLLSSHSEEHMTQALTQDSTLFFSFGRFIANYMKSNKRAGVILNVITSETLDTANYTIGNKAMIAGLTQNWAKELKHFDVRVGSIVPISYQETNTSAPLSLSMQYEMVRSAEYIVENDYFNGRIIEAEHQ

SEQ ID NO: 91961 - protein, 252 aa, Photorhabdus asymbiotica
  REGION 1..252: note = tr|C7BNH5|C7BNH5_PHOAA 2,3-dihydro-2,3-dihydroxybenzoate OS=Photorhabdus asymbiotica subsp. asymbiotica (strain ATCC 43949 / 3105-77) OX=553480 GN=phbA PE=4 SV=1
MSITLDFSDKIVWITGAGSGIGYQTAYRFQQAGAKVIGFDITFPEGDLPFTPYLLDISDTIAVSRCCEQLLVQQPRLDVLVNGAGILRLGATEEITFEDWQQCLSVNAGGAFNLFQATIPQFQRQKAGAIVTIASNAAHVPRVGMSAYCASKAALRSLCLSVGLELAPYGVRCNLVSPGSTDTPMQRDMWQTEASKQQVIQGFSELFKLGIPLGKIATPTEIADAILFMASDLASHITLQDIVIDGGATLGA

SEQ ID NO: 91962 - protein, 252 aa, unidentified
  source 1..252: note = Photorhabdus australis
  REGION 1..252: note = tr|A0A1C0U9U4|A0A1C0U9U4_9GAMM 2,3-dihydro-2,3-dihydroxybenzoate dehydrogenase; OS = Photorhabdus australis OX=286156 GN=entA PE=4 SV=1
MSITLDFSDKIVWVTGAGSGIGYQTAYRFQQAGAKVIGFDITFPEGNLPFTPCLLDISDNIAVSRCCEQLLAQQPRLDVLVNGAGILRLGATEEIMFEDWQQCLSVNAGGAFNLFQATIPQFQRQKAGAIVTIASNAAHVPRVGMSAYCASKAALRSLCLSVGLELAPYGVRCNLVSPGSTDTPMQRDMWQTEASKQQVIQGFSELFKLGIPLGKIATPTEIADAVLFMASDLASHITLQDIVIDGGATLGA

SEQ ID NO: 91963 - protein, 252 aa, unidentified
  source 1..252: note = Photorhabdus heterorhabditis
  REGION 1..252: note = tr|A0A0M9D0I7|A0A0M9D0I7_9GAMM 2,3-dihydroxybenzoate-2,3-dehydrogenase OS=Photorhabdus heterorhabditis OX=880156 GN=AM629_07730 PE=4 SV=1
MSITLDFSDKIVWVTGAGSGIGYQTAYRFQQAGAKVIGFDITFPDGDLPFTPYLLDISDTIAVSHCCEQLLAQQPQLDVLVNGAGILRLGATEEITFEDWQQCLSVNAGGAFNLFQATIPQFQRQKAGAIVTIASNAAHVPRVGMSAYCASKAALRSLCLSVGLELAPYGVRCNLISPGSTDTPMQRDMWQTAASKQQVIQGFSELFKLGIPLGKIATPTEIADAVLFMASDLASHITLQDIVIDGGATLGA

SEQ ID NO: 91964 - protein, 256 aa, Photorhabdus luminescens
  REGION 1..256: note = tr|A0A022PJW8|A0A022PJW8_PHOLU 2,3-dihydro-2,3-dihydroxybenzoate dehydrogenase; OS = Photorhabdus luminescens BA1 OX=1393736; GN = BA1DRAFT_02654 PE=4 SV=1
MKNKQNLQMDFSHKTVWVTGAARGIGEQIARDFTALGANVIGFDRVFEQDDLPYQCIQLDISDPEKVEMICSQQLSISAKLDILVNAAGILQLGNIDELNISDWHRCINVNASGAFYLLRAVVPHFKRQRSGAIISISSNAAHVPRMRMAAYCASKSALTSLTHCVGLELAPFGIRCNVVSPGSTDTPMQRSMWKTDDDEKNMINGYPEQYKLGIPLGKIASVNEISHTVLFLSSDLASHITLQDIVVDGGATLAC

SEQ ID NO: 91965 - protein, 256 aa, Photorhabdus luminescens
  REGION 1..256: note = tr|A0A5C4RGN4|A0A5C4RGN4_PHOLU 2,3-dihydro-2,3-dihydroxybenzoate dehydrogenase; OS = Photorhabdus luminescens subsp. sonorensis OX=1173677; GN = dhbA PE=4 SV=1
MKNKQNLQMDFSHKTVWVTGAARGIGEQIARDFTALGANVIGFDHVFEQDNLPYKCIQLDISDPEKVEMICSQQLSISDKLDILVNAAGILQLGNVDELNISDWHRCINVNASGAFYLFRTVIPHFKRQRSGNIISVSSNAAHVPRMRMAAYCASKSALTSLTHCVGLELAPFGVRCNVVSPGSTDTLMQRSMWKTDDDEKNTINGYPEQYKLGIPLGKIANVNEISHTVLFLSSDLASHITLQDIVVDGGATLAC

SEQ ID NO: 91966 - protein, 256 aa, unidentified
  source 1..256: note = Photorhabdus namnaonensis
  REGION 1..256: note = tr|A0A1B8YE17|A0A1B8YE17_9GAMM 2,3-dihydro-2,3-dihydroxybenzoate dehydrogenase; OS = Photorhabdus namnaonensis OX=1851568 GN=entA PE=4 SV=1
MQNKQNLQMDFSRKTVWVTGAARGIGEQIARDFTALGANVIGFDRVFEQDNLPYQCIQLDISDPEKVEMICSQQLSISAKLDILVNAAGILQLGNIDELNISDWHRCINVNASGAFYLFHTVVPHFKRQRSGAIISISSNAAHVPRMRMAAYCASKSALTSLTHCVGLELAPFGVRCNVVSPGSTDTPMQRSMWKTDDDEKNTINGYPEQYKLGIPLGKIANVNEISHTVLFLSSDLASHITLQDIVVDGGATLAC

SEQ ID NO: 91967 - protein, 252 aa, Photorhabdus temperata
  REGION 1..252: note = tr|U7R8F6|U7R8F6_PHOTE 2,3-dihydroxybenzoate-2,3-dehydrogenase OS=Photorhabdus temperata J3 OX=1389415 GN=O185_00655 PE=4 SV=1
MSIALDFSDKIVWVTGAGSGIGYQTAYRFQQAGAKVIGFDITFPEGDLPFIPYLLDISDPIAVSRCCEQLLAQQPQLDVLVNGAGILRLGAAEEITFEDWQQCLSVNAGGAFNLFQATIPQFQRQKAGAIVTIASNAAHVPRVGMSAYCASKAALRSLCLSVGLELAPYGVRCNLISPGSTDTPMQRGMWQTEASKQQVIQGSSELFKLGIPLGKIATPTEIADAVLFMASDLASHITLQDIVIDGGATLGA

SEQ ID NO: 91968 - protein, 252 aa, Photorhabdus temperata
  REGION 1..252: note = tr|T0P2R3|T0P2R3_PHOTE 2,3-dihydroxybenzoate-2,3-dehydrogenase OS=Photorhabdus temperata subsp. temperata M1021 OX=1221520 GN=B738_05844; PE = 4 SV=1
MSIALDFSDKIVWVTGAGSGIGYQTAYRFQQAGAKVIGFDITFPEGDLPFIPYLLDISDPIAVSRCCEQLLAQQPQLDVLVNGAGILRLGAAEEITFEDWQQCLSVNAGGAFNLFQATIPQFQRQKAGAIVTIASNAAHVPRVGMSAYCASKAALRSLCLSVGLELAPYGVRCNLISPGSTDTPMQRGMWQTEASKQQVIQGSSKLFKLGIPLGKIATPTEIADAVLFMASDLASHITLQDIVIDGGATLGA

SEQ ID NO: 91969 - protein, 252 aa, Photorhabdus temperata; identical to SEQ ID NO: 91967
  REGION 1..252: note = tr|A0A081S275|A0A081S275_PHOTE 2,3-dihydro-2,3-dihydroxybenzoate dehydrogenase; OS = Photorhabdus temperata subsp. temperata Meg1 OX=1393735; GN = MEG1DRAFT_00418 PE=4 SV= 1

SEQ ID NO: 91970 - protein, 252 aa, unidentified
  source 1..252: note = Photorhabdus thracensis
  REGION 1..252: note = tr|A0A0F7LGW8|A0A0F7LGW8_9GAMM 2,3-dihydroxybenzoate-2,3-dehydrogenase OS=Photorhabdus thracensis OX=230089 GN=VY86_02555 PE=4 SV=1
MSIALDFSDKIVWVTGAGSGIGYQTAYRFQQAGAKVIGFDITFPEGDLPFIPYLLDISDPIAVSRCCEQLLAQQPQLDVLVNGAGILRLGAAEEITFEDWQQCLSVNAGGAFNLFQATIPQFQRQKAGAIVTIASNAAHVPRVGMSAYCASKAALRSLCLSVGLELAPYGVRCNLISPGSTDTPMQRGMWQTEAFKQQVIQGSSELFKLGIPLGKIATPTEIADAVLFMASNLASHITLQDIVIDGGATLGA

SEQ ID NO: 91971 - protein, 248 aa, unidentified
  source 1..248: note = Phytobacter ursingii
  REGION 1..248: note = tr|A0A0G3QBD4|A0A0G3QBD4_9GAMM 2,3-dihydroxybenzoate-2,3-dehydrogenase OS=Phytobacter ursingii OX=1972431 GN=AB182_18165 PE=4 SV=1
MDFSGKTVWVTGAGKGIGYATALAFADAGAQVTGFDQAFDGEHYPFTTEILDIADAEQVSRVCSRVLAQNTRLDVLVNAAGILRMGATDALSQEDWQQTFAVNVGGAFNLFQATMAQFRQQQGGAMVTVASDAAHTPRIGMSAYGASKAALKSLALTVGLELAASGVRANLVSPGSTDTDMQRTLWTSSDAEQKRIAGFGEQFKLGIPLGKIARPEEVASTILFLASDYASHITLQDIVVDGGSTLGA

SEQ ID NO: 91972 - protein, 287 aa, unidentified
  source 1..287: note = Pigmentiphaga aceris
  REGION 1..287: note = tr|A0A5C0B4I2|A0A5C0B4I2_9BURK 2,3-dihydro-2,3-dihydroxybenzoate dehydrogenase; OS = Pigmentiphaga aceris OX=1940612 GN=FXN63_25615 PE=4 SV=1
MPDDNGEDSIAKPGEPAANDRIVPHTRPIVGDFAESRVLVTGAASGIGAAVVRALLAQGARVAALDLDELGLETLRTEAAPGQLHLATVDVSDSAAVDRAVVEAEAAIGHLDKLACVAGVLQMGKIVDLSDEQWARPFAVNATGTFNVCRAVARGMIERRSGSIVNISSNAAGTPRTGMGAYAASKAAVSQLTRCLALELAEYGIRCNIVSPGSTDTEMQRAMWREGSSRETVIEGSLAGYRLGIPLRQIATPEEVAESVLFLLSDRASHITLHDLRVDGGATLDQG

SEQ ID NO: 91973 - protein, 558 aa, Planctomyces sp.
  REGION 1..558: note = tr|A0A142WTS0|A0A142WTS0_9PLAN 2,3-dihydro-2,3-dihydroxybenzoate dehydrogenase; OS = Planctomyces sp. SH-PL14 OX=1632864 GN=entA PE=4 SV=1
MIVFVTGGTGFVGRAFLPQLLEALSADDEIRVLSRGPAAGPTDRRIRPIAGDLETPDRWIDALDGVAYVFHIAADARFGQGTHYHGVNVAPVEAMLSRLRTSDTLRGFILVSTVGAVDRAPADDVRQPLTLQSAPHPTSDYGRSKRGAEELVERSGLPYTILRPGWVYGSGMRAGSHLNVMARMIRRKPWTARLGFPGRVPLIHVEDLAPALVRCLNSPAARGKTYFAVTENRSLAEVWSLLHETLRGRRPRQFRFPSLRSVLGRLHSRLPLTVNNLFLDYLAADDPDFRRDLLAERPIRLEEGARDVAARHRPEGSWWIVTGANSGIGFALTAALREAGHPVVAVDRAVDRLSEDPGLKVIAADLTQEADLQRLRKAVEPLCLGGLINNAGIGIRGGLFDLPWEASERTVRINVLGTMHLTHLLKEQLTREGSVIVNIASSVAYHPLPGMSVYAASKAFLLNWSLAFSEELRETNLVVTYSPSGTRTNFQASGGVRGANSAELLTPEAVARDILDTVRRERRHRLLGWKSRILVTLSDWLPVSLRLRLWGWLFAARR

SEQ ID NO: 91974 - protein, 268 aa, unidentified
  source 1..268: note = Planctomycetes bacterium
  REGION 1..268: note = tr|A0A5C5VAZ1|A0A5C5VAZ1_9BACT 2,3-dihydro-2,3-dihydroxybenzoate dehydrogenase; OS = Planctomycetes bacterium Enr8 OX=2527970 GN=entA PE=4; SV = 1
MRPTGSVQFDNSGRVVLVTGGAGGIGLAICQAFAASGATVYAVDVAEPEGELPAKLISGDVSKREECRRVIAQVVEEAGAIDVLVNNAAIQPPASYKAIDELSTETWDKMVAINLSGYAYMAMETAAVMRKQQSGVIVNMASAQAHRTAREVPAYGPIKAANVMQAKQWGVELAREGVRVVSVSPGAVGTPLLRASLAQQGGEESLANRHPLGRIGEPPEIAAAVLWLASEGASFITATDIEVDGGLGAFAAFADPFSVATLPGKNDC

SEQ ID NO: 91975 - protein, 251 aa, unidentified
  source 1..251: note = Pluralibacter gergoviae
  REGION 1..251: note = tr|A0A0J5P0Q4|A0A0J5P0Q4_PLUGE 2,3-dihydroxybenzoate-2,3-dehydrogenase OS=Pluralibacter gergoviae OX=61647 GN=ABW06_09860 PE=4 SV=1
MAGFDFHGRRVWVTGAGKGIGYATALAFAEAGAEVVGFDLQFDKADYPFTTEVLDVADAGQVAETCRRLLAVTPRLDVLVNAAGILRMGATDAISVDDWQQTFAVNVGGAFNLFQQTMAQFRQQQGGAIVTVASDAAHTPRIGMSAYGASKAALKSLALTVGLELAASGVRCNLVSPGSTDTDMQRTLWVSEDAEQQRIRGFGEQFKLGIPLGKIARPQEIASTVLFLASDLASHITLQDIVVDGGSTLGA

SEQ ID NO: 91976 - protein, 258 aa, Polyangium fumosum
  REGION 1..258: note = tr|A0A4V5PNC0|A0A4V5PNC0_9DELT 2,3-dihydro-2,3-dihydroxybenzoate dehydrogenase; OS = Polyangium fumosum OX=889272 GN=E8A74_06640 PE=3 SV=1
MAFTGKTALVTGAAQGIGEAVVRALAARGARVAAVDSNAKRLGEVVAEMQASGQRVEPFSADVTNSEAVDATVDRIEREHGPIDFLVNVAGVLHVGPIEALRDEDWERTFAVNARGVFYLCRAVARHMVPRRSGAIVTVGSNAARTPRMHMSAYAASKAAVAMFTQCLGLELAKHGIRCNVVSPGSTDTPMQRSLWKDGSGAQAVIDGAPAAFKVGIPLQRIAEPADVADAVLFLLSDQARHITMHDLCIDGGATLGV

SEQ ID NO: 91977 - protein, 258 aa, Polyangium sp.
  REGION 1..258: note = tr|A0A4U1HMG9|A0A4U1HMG9_9DELT 2,3-dihydro-2,3-dihydroxybenzoate dehydrogenase; OS = Polyangium sp. SDU3-1 OX=2567896 GN=E8A73_12625 PE=3; SV = 1
MELAGKIALVTGAAQGIGEAVARALAARGATVATLDSNPERLYAVVAQMQASGHRAEPFPADVTDREAVDAAVDRIERELGPIDFLVNVAGVLHVGALETLRDEDWERSFAVNARGVFYLCQAVARRMVPRRSGAIVTVGSNAARTPRMNMSVYAASKAASTMFTKCLGLELAQHGIRCNVVSPGSTDTPMQRSLWKDGKGAQAVIDGAPDAFRLGIPLQRMADPRDVAGAVLFLLSEQARHITMHDLCVDGGATLGA

SEQ ID NO: 91978 - protein, 325 aa, unidentified
  source 1..325: note = Pontivivens insulae
  REGION 1..325: note = tr|A0A2R8A705|A0A2R8A705_9RHOB 2,3-dihydro-2,3-dihydroxybenzoate dehydrogenase; OS = Pontivivens insulae OX=1639689 GN=entA PE=4 SV=1
MSLSDQTPLETGFHAKSTASEVLADIDLTDKTAIVTGGYSGIGLETVRALAEKGAKIIVPVRSREKAADALAGVAGDVSSKAMDLGDIASVRAFAAEVASEHPVIDILICNAGIMACPEARIGDGWESQFGICHMGHFALVTSLMEQLEASEGARIVALSSTGHKLSGIRWDDMHFQAEPYDKWVAYGQAKTANALFANALSRRLKPSGGHAFSVHPGGIFTPLQRHLPKEEMIALGWLGEDGEPSELAKAGFKSPEQGASTTLWAATSPALNGHAGVYCEDCNIAAPSDPESETSRYFGVEAHAADDAEAERLWEWSANALKAV

SEQ ID NO: 91979 - protein, 256 aa, Porphyrobacter sp.
  REGION 1..256: note = tr|A0A0P7Z3V9|A0A0P7Z3V9_9SPHN 2,3-dihydro-2,3-dihydroxybenzoate dehydrogenase; OS = Porphyrobacter sp. HL-46 OX=1479239 GN=entA PE=4 SV=1
MYGISDFTGRSALVTGAASGIGAACARALAARGAARLFLVDVDGAGLDALELAAHAGCEVHRINGSVADEALWGALGPRLAGLDHAVVNAGIGSGGPIAEISLAEWRRVMAVNLDGAFLTLVSSLRAMGATGGSAVVVASVTGLKPVAGIGPYGVSKAAVAHMARIAAAENAKKGIRINAIAPGGVDTAIWESGEDFQRSVAAIGREATLKAMAKTTPLGRFATPAEMAENILYLLSDAASNITGHVMVSDGGFTL

SEQ ID NO: 91980 - protein, 245 aa, unidentified
  source 1..245: note = Primorskyibacter insulae
  REGION 1..245: note = tr|A0A2R8AQ81|A0A2R8AQ81_9RHOB 2,3-dihydro-2,3-dihydroxybenzoate dehydrogenase; OS = Primorskyibacter insulae OX=1695997 GN=entA PE=3 SV=1
MSKTIIITGAGRGVGKATALAFLDAGWRVGLVGRTAAPLEELAAAHEGALALPCDVTDEASVEAAFEKAYAEWGHLDALFNNAGVSMKGAPIDELSVDDWRNLIDINVTGSFIAARAAFGIMRRQDPQGGRIINNGSVSAYVPRWGSAPYTASKHAITGLTRTISLDGRPFNIACGQIDIGNTLTDMAAKMTQGVPQADGSIAIEPVMDVSNVANSVLHMANLPLEANVQFMTVMATAMPFIGRG

SEQ ID NO: 91981 - protein, 276 aa, Propionispora sp.
  REGION 1..276: note = tr|A0A0K8JCJ2|A0A0K8JCJ2_9FIRM 2,3-dihydro-2,3-dihydroxybenzoate dehydrogenase; OS = Propionispora sp. 2/2-37 OX=1677858 GN=dhbA PE=3 SV=1
MNHRWIAWRKERKGKMSFLNLEGKTALVTGGAQGIGEAVVRSLCEAGAVVAVIDRNPQKLNDFVARLKSAGCKAEAFPADVSDREAVDTVIEGIERNLGPIEILVNVAGVLHMGWIAELSDEAWEKTFTVNTTGVFYISRAVSRYMVSRGHGSIVTVGSNAAKVPRIAMAAYASSKAAAAMFTKCLGLELARHNIRCNIVSPGSTNTPMQWSLWNDADGAAAVIDGSQEAFKTGIPLKKLADPSDIAAAVLFLVSDKAGHITMHDICVDGGATLGV

SEQ ID NO: 91982 - protein, 251 aa, Providencia sneebia
  REGION 1..251: note = tr|K8W5T8|K8W5T8_9GAMM 2,3-dihydroxybenzoate-2,3-dehydrogenase OS=Providencia sneebia DSM 19967 OX=1141660 GN=OO7_13329 PE=4 SV=1
MTRFDFQGKTVWITGAGKGIGYTSALAFVEAGAQVIGFDREFLLENYPFNTQKMDVSNAAQVKEVCQRLLQQIDQLDVLVNAAGILHIGATDTLNAEEWQQTFAVNVGGAFNLFQQTMGQFRKQQRGVIVTVASDAAHIPRIGMSAYGASKAALKSLTLTVGLELAGSGVRCNIVSPGSTDTDMQRSLWSNSDAEQQRIHGFCEQFKLGIPLGKIARPQEVASTILFLASDLASHITLQDIVVDGGSILGA

SEQ ID NO: 91983 - protein, 258 aa, Pseudaminobacter sp.
  REGION 1..258: note = tr|A0A432V7V2|A0A432V7V2_9RHIZ 2,3-dihydro-2,3-dihydroxybenzoate dehydrogenase; OS = Pseudaminobacter sp. CB3 OX=1851146 GN=EET67_08960 PE=4; SV = 1
MRPTGLEGKTALVTGAGGGIGEAVVRLLVDEGAHVLATDVDAAALAPLADLPAGRVTTAMLDVRDAAAVEALVDRREKEHGPIDLGVSVAGILSTDLVTETSDETWRNVFAVNCDGVFHVSRALARRMKVGRRGALVTVSSNAAGIPRHAMAAYAASKAAATMFTRCLGLELAPLGIRCNIVAPGSTLTPMQTGMWADEAGAQKVIAGSLETFKSGIPLGKLATPDDVAEAVVFLLSDRAGHITMGDLYVDGGATLRA

SEQ ID NO: 91984 - protein, 254 aa, Pseudoalteromonas citrea
  REGION 1..254: note = tr|U1KJP5|U1KJP5_9GAMM 2,3-dihydroxybenzoate-2,3-dehydrogenase; OS = Pseudoalteromonas citrea DSM 8771 OX=1117314; GN = PCIT_18039 PE=4 SV=1
MSFDTQLKTEYQDKVVWVTGVGQGIGLSAAQHFAKLGAKVIGFDKHFSDTACLYKPVQCDLAKLAELEATLSELIAQGLAPYNLINVAGVLEFETMEHLSLAQWMQCQTINSSAVFLFIKACYAHFKTNQQGSIVTVGSNAANTPRQKMAAYCASKAAVTQLTLTAGLELANYGVRCNVIAPGSTLTPMQTGMWQDESGAHNVIAGFAQEYKLGIPLQKIATADEIARSIVFIASQLSSHTTMQVLTIDGGATF

SEQ ID NO: 91985 - protein, 254 aa, Pseudoalteromonas luteoviolacea
  REGION 1..254: note = tr|A0A167H226|A0A167H226_9GAMM 2,3-dihydroxybenzoate-2,3-dehydrogenase; OS = Pseudoalteromonas luteoviolacea CPMOR-1 OX=1365248; GN = N473_06590 PE=4 SV=1
MDFHNALTSEYNQQVVWVTGVGQGIGLAVAKQFAALGAKVIGFDRQFSDTSMLFKHVLCDLSAPEQLTQTLNELIQHGLAPYNLVYVAGVLEMGGLDELNLAQWQHCQNVNSASLFVFIQQCAKHFKQTRQGSIVTIGSNAANTPRQQMGAYCASKAAATQLTLTAGIELANFGIRCNVIAPGSTLTPMQTGMWQDEHGAQRVIEGFAEQYKLGIPLQKIATPEEIANTAVFIASNLSSHTTMQVLTIDGGATF

SEQ ID NO: 91986 - protein, 254 aa, Pseudoalteromonas luteoviolacea
  REGION 1..254: note = tr|A0A541BJB1|A0A541BJB1_9GAMM 2,3-dihydro-2,3-dihydroxybenzoate dehydrogenase; OS = Pseudoalteromonas luteoviolacea OX=43657 GN=dhbA PE=4; SV = 1
MQFEQALNAEYRDKIIWVTGVGQGIGLAVAKHFHALGAKVIGFDRHFNEPDALYKQIVCDLAQPEQVEQILAELIEQQLAPYNLIYVAGVLEMGELEALSLSQWQHCHNVNAASLFAFIKHCGAHFKQQRVGSLVTIGSNAADTPRQQMGAYCASKAAATQLTLTAGIEWANFGVRCNVIAPGSTLTPMQTGMWQDEQGAQRVIDGFAEQYKLGIPLQKIATPEEIAHSAVFLASNLSSHTTMQVLTIDGGATF

SEQ ID NO: 91987 - protein, 257 aa, Pseudoalteromonas piscicida
  REGION 1..257: note = tr|A0A0F4NT69|A0A0F4NT69_PSEO7 2,3-dihydro-2,3-dihydroxybenzoate dehydrogenase; OS = Pseudoalteromonas piscicida OX=43662 GN=D0N37_00670; PE = 4 SV=1
MSNECEFTGRIALVTGAYQGIGKALVEQLLARGAIVVAADIAIAASQLQEVTANHFQIHLDVTNKNLVQTVVEEIEIQLGALEYVASVAGILHMGTLLEQSDAQWLDTFAVNCHGPFYLCQAVANKMRIRKRGAIVAVSSNAASTPRVNMGSYCASKAALSAMIKTLALEVAPFNIRCNLVAPGSTDTQMQQQLWRDENGAEQTIQGDLTQFKLGIPLGRIASATDIANSILFLLSDQARHITMANLLVDGGATLGH

SEQ ID NO: 91988 - protein, 254 aa, Pseudoalteromonas rubra
  REGION 1..254: note = tr|U1KVL6|U1KVL6_9GAMM 2,3-dihydroxybenzoate-2,3-dehydrogenase; OS = Pseudoalteromonas rubra DSM 6842 OX=1117318; GN = PRUB_05886 PE=4 SV=1
MSFDARLQQEYHEQIVWISGVGQGIGLAAAQRFHALGAKVIGFDRQFSDLSVLHRAVECDLSAPELLAQQLDKLVAEGLVPYNLINVAGVLELGDLEQLTLAQWQHCQTVNSTAVFTFLRACTPHFKQQGKGAVVTVGSNAADTPRQQMAAYCASKAAVTQLTLTAGLELANFGVRCNVIAPGSTLTPMQTGMWQDEKGAQRVIDGFAAQYKLGIPLQKLATAEEIADSIVFVASSLSSHTTLQVITLDGGATF

SEQ ID NO: 91989 - protein, 257 aa, Pseudoalteromonas sp.
  REGION 1..257: note = tr|A0A4Q6Z310|A0A4Q6Z310_9GAMM 2,3-dihydro-2,3-dihydroxybenzoate dehydrogenase; OS = Pseudoalteromonas sp. CO342X OX=1777270 GN=dhbA PE=4; SV = 1
MSNECEFTGRIALVTGAYQGIGKALVEQLLARGAIVVAADIATAASQLQEVTANHFQIHLDVTNKNLVQTVVEEIEIQLGAIEYVASVAGILHMGTLLEQSDAQWLDTFAVNCHGPFYLCQAVANKMRIRKRGAIVAVSSNAASTPRVNMGSYCASKAALSAMIKTLALEVAPFNIRCNLVAPGSTDTQMQQQLWRDENGAEQTIQGDLTQFKLGIPLGRIASATDIANSILFLLSDQARHITMANLLVDGGATLGH

SEQ ID NO: 91990 - protein, 254 aa, Pseudoalteromonas sp.
  REGION 1..254: note = tr|A0A3R8TA09|A0A3R8TA09_9GAMM 2,3-dihydro-2,3-dihydroxybenzoate dehydrogenase; OS = Pseudoalteromonas sp. J010 OX=998465 GN=dhbA PE=4 SV=1
MGFDSLLQQEYRNKVVWITGAGQGIGQSIAEKFIQLGARVVGFDKQFPRTHNLFKAVQCDLEDLTTLQATLTELIQQGLAPYNLLNVAGVLELGELESHSLEQWQHCQHVNAGAVFVFLKACASHFKQQGLGSIVTVSSNASHTPRQSMAAYCASKSAATQLTLTAGLELAPYGIRANVIAPGSTLTPMQTGMWLDDSGADQVIRGFASQYKLGIPLQKLATPEEIANSVLFFASSLSSHTTLQVLTIDGGATL

SEQ ID NO: 91991 - protein, 254 aa, Pseudoalteromonas sp.
  REGION 1..254: note = tr|A0A3S5I6E9|A0A3S5I6E9_9GAMM 2,3-dihydro-2,3-dihydroxybenzoate dehydrogenase; OS = Pseudoalteromonas sp. R3 OX=1709477 GN=dhbA PE=4 SV=1
MSYDARLQQEYQDQIVWISGVGQGIGLATAQRFAALGAKVIGFDRQFSDTDILERAVQCDLADLAQLEATLDELLAQGLAPYNLINIAGVLELGEVEQLSLAQWQHCLNVNAGAVFTFIRACTPHLKQQQAGAIVTVGSNAAHTPRQQMAAYCASKAAVTQLTLSAGLELANFGVRCNVVAPGSTLTPMQTGMWQDEQGAQRVIEGFAPQYKLGIPLKKLATAQEIADSVVFLASKLSSHTTLQTITIDGGATF

SEQ ID NO: 91992 - protein, 251 aa, unidentified
  source 1..251: note = Pseudocitrobacter sp.
  REGION 1..251: note = tr|A0A5B0K3I9|A0A5B0K3I9_9ENTR 2,3-dihydro-2,3-dihydroxybenzoate dehydrogenase; OS = Pseudocitrobacter sp. 73 OX=2605731 GN=dhbA PE=4 SV=1
MSGFDFNGKTVWVTGAGRGIGFATAQVFVEAGATVVGFDLAFADEEYPFTTQALDVSDARQVAEVCERLLATTPRLEVLVNAAGILRMGATDALSIDDWQQTFAVNVGGAFNLFQQTMATFRQQQGGAIVTVASDAAHTPRIGMSAYGASKAALKSLALTVGLELAGSGVRCNLVSPGSTDTDMQRGMWQSDDAEQQRIRGFGEQFKLGIPLGKIAQPQEIANTVLFLASDYASHITLQDIVVDGGSTLGA

SEQ ID NO: 91993 - protein, 254 aa, unidentified
  source 1..254: note = Pseudogulbenkiania ferrooxidans
  REGION 1..254: note = tr|U1AIF4|U1AIF4_9NEIS 2,3-dihydroxybenzoate-2,3-dehydrogenase; OS = Pseudogulbenkiania ferrooxidans EGD-HP2 OX=1388764; GN = O166_23030 PE=4 SV=1
MIGMDFTGQCVWVTGAAQGIGQEVARRFVEAGARVVALDLQFAQPAAHCGVMRELPLDIRDADAVAALCRRLAEEDALPDVLVNAAGVLRLGAFDALSVDDWQQCLAVNVSGPFYLLRALMPHFKARRAGAIINVASNAAHVPRIDMAAYGASKAAMASLSHNAALELAPYGVRCNVVSPGSTDTPMLRGMWQDEHGAARTIAGKPEAFRLGIPLGKLATPADVAGAVLYLASDLAGHVTMQDIVVDGGATLAA

SEQ ID NO: 91994 - protein, 247 aa, Pseudomonas citronellolis
  REGION 1..247: note = tr|A0A127MS40|A0A127MS40_9PSED 2,3-dihydro-2,3-dihydroxybenzoate dehydrogenase; OS = Pseudomonas citronellolis OX=53408 GN=entA PE=4 SV=1
MPSNDSRSPLAVITGAGSGIGLAVARRLLREGTRVVAMARREVPPAELDEAGGHLCWLSGDVTRAEDLQCLADLARELGPVDYLLPNAGIAQLADGLDQAAFQRQWAVNGAGALNTLAALRGQMARPSSVVFIGTFLSQVSFPGLAAYIASKSALKAQARTLAVELAGEGIRVNVVSPGPTATPIWGTLGLDDEALGKVAASVNGRLLDGRFLEAEAVADAILFMLSDQARGIHGQDLVVDNGYTLR

SEQ ID NO: 91995 - protein, 490 aa, Pseudomonas fluorescens
  REGION 1..490: note = tr|G8Q676|G8Q676_PSEF3 N-acyl-D-amino-acid deacylase; OS = Pseudomonas fluorescens (strain F113) OX=1114970; GN = PSF113_0729 PE=4 SV=1
MLYDTLIRNALVIDGSDTPGYRADVAIRGGRIERIGDLRDTRAVEDIDAAGRVLAPGFIDVHTHDDTVVIRQPQMLPKLSQGVTTVIVGNCGISASPVSLRGDPPDPMNLLGTAQAFAYPRFTDYRAAVEAATPAVNVAALVGHTALRSNHMDDLLRTASVGEIAAMRRQLRESLEAGALGLSTGLAYANAFSASTDEVMQLSEELAAFGAVYTTHLRSEFEPVLEAMDEAFQIGRHAQSPVIISHLKCAGAGNWGRSPQVLAALENAAKTHPVGCDCYPYAASSSTLDLKQVTDAHRITITWSTAHPHMGGRDLADIANEWDVSLLEAARRLQPAGAVYYGMDEGDVRRILAHPLSMVGSDGLPEDPFPHPRLWGAFPRVLGHFSRDIGLFPLHTAVHKMTGLSAARFGLKHRGEIREGHWADLVLFNPQTIRDVADFNEPQRAADGIDGVWVNGVLSYREGQANGRREGRFLAREGDLRRGFSPSDSV

SEQ ID NO: 91996 - protein, 303 aa, Pseudomonas fluorescens
  REGION 1..303: note = tr|A0A3S4PG89|A0A3S4PG89_PSEFL Oxidoreductase; OS = Pseudomonas fluorescens OX=294 GN=entA PE=4 SV=1
MTRITTPFGFHSTAQEVIEGVDLSGKRAIVTGGASGIGIETARALVNAGADVTLAVRRPEAAESVAAQLRAGGRGRVDIRTVDLADLTSVKSFAECWSEPLHILVNNAGIMAVPERQLSAQGWELQFASNFLGHFALVLGLQNALSSAAGARIVSLSSNANLLGPVVFDDINFDFRAYDAFAAYAQAKSACALIAVEITRRWAERGIFANALNPGAIATNLQKHTGGLKTPIERQKTVQQGAATSILLAASPLLAGIGGRYFEDCNEALVVDKRPADYTGVAPYAVDPDNARRLWDVATAMIS

SEQ ID NO: 91997 - protein, 329 aa, Pseudomonas knackmussii
  REGION 1..329: note = tr|A0A024HI36|A0A024HI36_PSEKB Short-chain dehydrogenase/reductase SDR OS=Pseudomonas knackmussii (strain DSM 6978 / LMG 23759 / B13) OX=1301098 GN=PKB_3346; PE = 4 SV= 1
MMAGEAGMASLGDGYRALVIGASGAIGAAFCALLRDDPRCARVVELGRRSSPRLDLEDPPSIAAAAHEVAVHAPFQLILHAAGLLHRDGLRPEKRLADLDALALQQVFQVNAIGPVLVLRHFLPLLDRRGAMALLSAKVGSVGDNRLGGWYAYRASKAALNMLVKTASIELARTHPQARLLCLHPGTVASALSQPFHGAANARPAAQAALLRLRRGAPALVTTKQESLMNLLELTELAAAGNIRLLEVVSLEGGFYVVQVHTADTIKALHDEHGGVLRLLSVTHVREYLRDLPAVPCELVQHSIHDEMCGSRSGAIEPLRVPFSLVQQW

SEQ ID NO: 91998 - protein, 247 aa, Pseudomonas mendocina
  REGION 1..247: note = tr|A0A379IXE1|A0A379IXE1_PSEME Short-chain dehydrogenase/reductase OS=Pseudomonas mendocina OX=300; GN = entA PE=4 SV=1
MSMNFQGRLAVVTGASSGIGLAVCDLLLQRGAQVLAFSRRLGALEALQARNPEQLHWCAGDVTDIDALHALAERAGRLGAVDYLVPNAGIARLAPGCDMQAFEQQWRVNGAGAVNTFEVLKPHLARPASVVFISTFLRQLGFAGLGGYIASKAALSALVRSLALEHAGEGLRLNLVSPGPTATPIWNSLGLAEEMLAGVASEVNKRLVDGEFLDPLAIAEVVLFQLSNGARGVYGQDWVVDKGYTLQ

SEQ ID NO: 91999 - protein, 105 aa, Pseudomonas oleovorans
  REGION 1..105: note = tr|A0A379K3N0|A0A379K3N0_PSEOL 3-ketoacyl-(Acyl-carrier-protein) reductase OS=Pseudomonas oleovorans OX=301 GN=fabG_1 PE=4 SV=1
MQLKDKVIIITGGCQGLGRAMGEYLAAKGAKLALVDLNQEKLDETVAACKAAGGDARAYLCNVADEEQVTHMVAQVADDFGAINGLVNNAGILRDGLTVRVKMAR

SEQ ID NO: 92000 - protein, 256 aa, Pseudomonas orientalis
  REGION 1..256: note = tr|A0A3G7X518|A0A3G7X518_9PSED 2,3-dihydro-2,3-dihydroxybenzoate dehydrogenase; OS = Pseudomonas orientalis OX=76758 GN=C4J97_4302 PE=4 SV=1
MSRFEHQSIVVTGAAQGIGAAITRLLLQEGADVFALDNNAQALAALADEQRSRRLHPKVVDITRPHEVELAIAAIDSQYPLTGLVNNAGVLVPKSIATTSAEEWQTTFEVNVHGTFFVSRAVAIRMAERGQGAIVTVASNAGSTPRINMGAYCSSKAAAAMLTRCIGLEFAAQGIRCNVVSPGSTRTSMLANIAGEGPQTEQRIIAGDPGQYRLGIPLQKIAEPQDIAAVVAFLLSGDANHITLQNLVVDGGATFE

SEQ ID NO: 92001 - protein, 232 aa, Pseudomonas pseudoalcaligenes
  REGION 1..232: note = tr|W6RDJ3|W6RDJ3_PSEP5 Short-chain dehydrogenase/reductase SDR OS=Pseudomonas pseudoalcaligenes (strain CECT 5344) OX=1182590; GN = BN5_1333 PE=4 SV=1
MTLHSLGNGYKALVIGASGTIGQAFCQLLRADPSCAGVRELSRSSSPALDLETPTSIAEAAAALADEGPYQLILHTAGLLHRPGIAPEKSLAAIDADALQAVFQVNALGPALVLRHFLPLLDKQGAMAMLSAKVGSIGDNRLGGWYAYRASKAALNMLIKTAAIELARSKPKARLLSLHPGTVISPLSQPFRGASAARPAELAAAEMLRVIDALGPEHSGSFHAYDGQPLPW

SEQ ID NO: 92002 - protein, 254 aa, Pseudomonas sp.
  REGION 1..254: note = tr|A0A4T1ZTV0|A0A4T1ZTV0_9PSED 2,3-dihydro-2,3-dihydroxybenzoate dehydrogenase; OS = Pseudomonas sp. CCM 8849 OX=2448482 GN=dhbA PE=4 SV=1
MQMNRQMDFSGQTIWVTGAGQGIGRSVAEGFAQLGGQVIGFDLNFPEQDYSFTRYVLDIGDAQAVQQACHELLGAHGVIDVLASVAGVLRLAPIEELALEDWDVCLRVNVSGPFYLLRQLMPRFKAWRRGTVVAVSSNAAHVPRMQMAAYSASKSALSSLIRTAGLELASHGVRCNLVSPGSTDTPMQRGMWHSSDAPARTIAGFPEQFKLGIPLQKIATPDEVANVVLFLASNLASHITLQDIVVDGGASLTD

SEQ ID NO: 92003 - protein, 249 aa, Pseudomonas sp.
  REGION 1..249: note = tr|A0A0F7XY00|A0A0F7XY00_9PSED 2,3-dihydro-2,3-dihydroxybenzoate dehydrogenase; OS = Pseudomonas sp. CCOS 191 OX=1649877 GN=entA PE=4 SV=1
MAMARFTGRRVLVTGAASGIGRCVAQRFVEEGAEVIGLDCEEADVPFPLMHVDLTDPADVQRVCDRLKEQAQYLDVLVNVAGVLRLGLSDEVSCEDWQRCLDVNASAPFYLMRQWTPVFRRQRRGAIVNVASNAAHVPRLNMAAYCASKAALVSLSHCVGLELAPYGVRCNVVSPGSTRTPMLAGMLGDPAAERQLIDGLPQQFKLGVPLGKIATPDDIAHVVLFLASEQAGHVTLQDIVVDGGATLAA

SEQ ID NO: 92004 - protein, 254 aa, Pseudomonas sp.
  REGION 1..254: note = tr|K5XIA6|K5XIA6_9PSED 2,3-dihydroxybenzoate-2,3-dehydrogenase OS=Pseudomonas sp. Chol1 OX=440512 GN=C211_06952 PE=4 SV=1
MQMTQQMDFRGRRIWVTGAGQGIGRAVAEGFARLGGEVVGLDRAFPECDYGYRTHVLDVGDAVAVRQACAELLAPGQGIDVFASVAGILRLGAIEALSLADWDDSLRVNVSGPFYLLRELLPRFRAQGRGAVVAVSSNATRVPRMQMAAYAASKAALTSLIRTAGLELASCGVRCNLVSPGSTDTAMQRGIWTDDNGRARTIAGLPEQFKLGIPLQKIATPEEVANTVLFLASDLASHITLQDIVVDGGATLAA

SEQ ID NO: 92005 - protein, 252 aa, Pseudomonas sp.
  REGION 1..252: note = tr|A0A4R0PXI1|A0A4R0PXI1_9PSED 2,3-dihydro-2,3-dihydroxybenzoate dehydrogenase; OS = Pseudomonas sp. IC_126 OX=2547400 GN=dhbA PE=4 SV=1
MNDQMDFSGRSVWVTGAGQGIGRAVAEGFVRLGAQVTGFDRAFPERDYGFTPYVLDVGDAHAVQQACSELLGAQQTVDVFASVAGILRLAPIEELSSADWDASMRVNVSGPFYLLRELIPRFKAQGHGAVVAVSSNATHVPRMQMAAYSASKAALSSLIRTAGLELAEHGVRCNLVSPGSTDTAMQRGMWHSEDARERTIAGFPEQYKLGIPLRKIATPEEVARTVLFLASDLASHITLQDIVVDGGATLAA

SEQ ID NO: 92006 - protein, 251 aa, Pseudomonas sp.
  REGION 1..251: note = tr|A0A329I3J6|A0A329I3J6_9PSED 2,3-dihydro-2,3-dihydroxybenzoate dehydrogenase; OS = Pseudomonas sp. RIT 411 OX=2202160 GN=DBY63_001695 PE=4; SV = 1
MTQLDFTGKRVWVTGAGQGIGLQVARRFQAAGAEVIGLDRQFAEGSYPFRTQLLDVADAAQVEDVCQALLAEERRLDVLVNGAGVLRLGTSDSLSLDDWQALLDVNVSGPFYLFRQLVPLFKAQGRGAIVNIASNAAHVPRLQMAGYCTSKAALVSLSHCVALELAGSGVRCNVVSPGSTATPMLAGMLGSPEGYQRLVDGLPEDFKLGIPLRKIAQPDEIANTVLFLASDLASHITMQDIVVDGGATLAA

SEQ ID NO: 92007 - protein, 252 aa, Pseudomonas sp.
  REGION 1..252: note = tr|A0A3R8WEI9|A0A3R8WEI9_9PSED 2,3-dihydro-2,3-dihydroxybenzoate dehydrogenase; OS = Pseudomonas sp. s199 OX=2479850 GN=dhbA PE=4 SV=1
MNHQMDFSGRNIWVTGAGQGIGRAVAEGFARLGGEVTGFDRAFPERDYGFTPYVLDVGDAQAVQQACRELLAEEGALDVFASVAGILRLALIEELTLADWDDSLQVNVSGPFYLLRELLPHFKRHGRGAVVAVSSNATHVPRMQMAAYSASKAALSSLIRTAGLELANHGVRCNLVSPGSTDTAMQRGMWHSEDARERTIAGFPEQYKLGIPLRKIATPEEIASTVLFLASDLASHITLQDIVVDGGATLTA

SEQ ID NO: 92008 - protein, 252 aa, Pseudomonas stutzeri
  REGION 1..252: note = tr|M2V5W9|M2V5W9_PSEST 2,3-dihydroxybenzoate-2,3-dehydrogenase OS=Pseudomonas stutzeri NF13 OX=1212548 GN=B381_05466 PE=4 SV=1
MTQQMDFHGRHIWVTGAGQGIGRAVAEGFARLGGEVVGLDQAFPECDYGYRTYVLDVSDAAAVHRACAELLAPGQGIDVLASVAGILRLGAIEELSLADWDDSLRVNLSGPFYLLRELLPRFKAQRRGAVVAVSSNATRVPRMQMAAYAASKAALTSLIRTAGLELATCGVRCNLVSPGSTDTAMQRGMWADDSGRTRTIAGFPEQFKLGIPLQKIATPEEVANTVLFLASDLASHITLQDIVVDGGATLAA

SEQ ID NO: 92009 - protein, 252 aa, Pseudomonas stutzeri
  REGION 1..252: note = tr|A0A379LDB4|A0A379LDB4_PSEST 2,3-dihydroxybenzoate-2,3-dehydrogenase OS=Pseudomonas stutzeri OX=316 GN=entA PE=4 SV=1
MNHQMDFSGRNIWVTGAGQGIGRAVAEGFARLGGEVTGFDRAFSERDYGFTPYVLDVCDAQAVQQACRELLAEEGALDVFASVAGILRLAPIEELTLADWDDSLQVNVSGPFYLLRELLPRFKRHGRGAVVAVSSNATHVPRMQMAAYSASKAALSSLIRTAGLELANHGVRCNLVSPGSTDTAMQRGMWHSEDARERTIAGFPEQYKLGIPLRKIATPEEIASTVLFLASDLASHITLQDIVVDGGATLTA

SEQ ID NO: 92010 - protein, 254 aa, Pseudomonas stutzeri
  REGION 1..254: note = tr|I4JLR5|I4JLR5_PSEST 2,3-dihydroxybenzoate-2,3-dehydrogenase OS=Pseudomonas stutzeri TS44 OX=477228 GN=YO5_11315 PE=4 SV=1
MQMTQQMDFRGRRIWVTGAGQGIGRAVAEGFARLGGEVLGLDRAFPERDYGYRTHVLDVGDAAAVRQACAELLVPGQGIDVFASVAGILRLGAIEELSLADWDDSLRVNVSGPFYLLRELLPRFRAQGRGAVVAVSSNATRVPRMQMAAYAASKAALSSLIRTAGLELASCGVRCNLVSPGSTDTAMQRGMWTDDSGRARTIAGLPEQFKLGIPLQKIATPEEVANTVLFLASDLASHITLQDIVVDGGATLAA

SEQ ID NO: 92011 - protein, 252 aa, unidentified
  source 1..252: note = Pseudomonas zhaodongensis
  REGION 1..252: note = tr|A0A3M2HPL9|A0A3M2HPL9_9PSED 2,3-dihydro-2,3-dihydroxybenzoate dehydrogenase; OS = Pseudomonas zhaodongensis OX=1176257 GN=dhbA PE=4 SV=1
MSDQMNFNGQGVWVTGAGQGIGRAVAEGFARLGAQVIGFDRAFGEKEYGFTPYVLDVGDAAAVKRTCNALLGAGKPVDAFVSVAGILRLGAVDELSLADWDDSMRVNVSGPFYLLRELIPHFKTRGSGNVVAVSSNATHVPRMQMAAYSASKAALTSLIRTAGLELAEHGVRCNLVSPGSTDTAMQRGMWHSEDALERTIAGFAEQYKLGIPLRKIATPDEVARTVLFLASDLASHITLQDIVVDGGATLAA

SEQ ID NO: 92012 - protein, 287 aa, Pseudonocardia autotrophica
  REGION 1..287: note = tr|A0A1Y2MPJ4|A0A1Y2MPJ4_PSEAH 2,3-dihydro-2,3-dihydroxybenzoate dehydrogenase; OS = Pseudonocardia autotrophica OX=2074 GN=entA PE=4 SV=1
MVTGAGAGIGRETARSLARAGAEVTLAVRRIDDAQEIAREIRAETGNEAVDVRPLDLADLASVAAFSKEWAGPLDLLINNAGIMALPEPTRTEQGWEMQFAVNHLGHFALALGLHDALAEASGARIVSVSSSGHHVSPVVFDDIHYRQRAYDPWSAYGQSKTANVLFAVAATTRWATEGIVANAVMPGGIMTGLQRHVPAEVRAQWEQVPSNKTPQQGAATTLVAAVAPEFAGVGGRYLEDGGEAPIVEDDAETDGVHGVRHWALDPTAAERLWETSEESLRSTRDR

SEQ ID NO: 92013 - protein, 254 aa, Pseudonocardia dioxanivorans
  REGION 1..254: note = tr|F4CNM6|F4CNM6_PSEUX 2,3-dihydro-2,3-dihydroxybenzoate dehydrogenase; OS = Pseudonocardia dioxanivorans (strain ATCC 55486 / DSM 44775 / JCM 13855 / CB1190) OX=675635GN=Psed_6223 PE=4 SV=1
MTDPEKPARIALVTGAGGGIGRAVVATLAARGHAVVASDVDAPDAPGAAANVALDVTDTAGVERVVDDVETTHGPIDVLVCTAGIIRPARLLDTTDDDWAAVLDVNTTGVLRMLRAVGRRMAGRRHGSIVVVASNAGSVPRTGIVGYATSKAAAIHLTRCAGLELAEFGVRANVVSPGSTDTTMLRALPVAGAVDDAAEKAIAGSLPDHRVGIPLRRVADPADIAEAVAYLASDAARHVTMQELYVDGGASLQT

SEQ ID NO: 92014 - protein, 247 aa, Pseudonocardia sp.
  REGION 1..247: note = tr|A0A1Q8JQV2|A0A1Q8JQV2_9PSEU 2,3-dihydro-2,3-dihydroxybenzoate dehydrogenase of siderophore biosynthesis OS=Pseudonocardia sp. Ae356_Ps1; OX = 1885032 GN=Ae356Ps1_445 9c PE=4 SV=1
MTGGARGIGAAVAAALAADGRPVALLDRDPAVRDTAAGLTGPAALGLVADADAGAVDRAVGEAERELGPLGVLVNAAGVLRTGTVLDADADDLATCLAVNTTGVWNTGRAAGRRMYGRGSGSIVTVASDASRTPRTGMAAYAASKAASVSLTRTLGLELAPHVRCNVVCPGATDTAMQRALWPDPSDDGGATAVVAGAPERYRLGIPLGRIADPGDVAAAVLFLAGDGARHVTMQSLTVDGGASLGL

SEQ ID NO: 92015 - protein, 255 aa, Pseudonocardia sp.
  REGION 1..255: note = tr|A0A1Q8KWZ3|A0A1Q8KWZ3_9PSEU 2,3-dihydro-2,3-dihydroxybenzoate dehydrogenase of siderophore biosynthesis OS=Pseudonocardia sp. Ae707_Ps1; OX = 1885572 GN=Ae707Ps1_527 0c PE=4 SV=1
MAASAALVTGGARGIGAAVAAALAADGRPVALLDRDPAVRDTAAGLTGPAALGLVADVADAGAVDRAVGEAERELGPLGVLVNAAGVLRTGTVLDADADDLATCLAVNTTGVWNTGRAAGRRMYGRGSGSIVTVASDASRTPRTGMAAYAASKAASVSLTRTLGLELAPHVRCNVVCPGATDTAMQRALWPDPSDDGGATAVVAGAPERYRLGIPLGRIADPGDVAAAVLFLAGDGARHVTMQSLTVDGGASLGL

SEQ ID NO: 92016 - protein, 241 aa, unidentified
  source 1..241: note = Pseudonocardiaceae bacterium
  REGION 1..241: note = tr|A0A419HJ58|A0A419HJ58_9PSEU 2,3-dihydro-2,3-dihydroxybenzoate dehydrogenase; OS = Pseudonocardiaceae bacterium YIM PH 21723 OX=2340915; GN = dhbA PE=4 SV=1
MNRFDGKVALVTGAGQGIGAAVARALADHGAIVAATDLKNTERTLDVTDADAVERTVAEIEDELGPIDIVVNVAGILRPNKAIDMSTQDWKDTFAVNTDGVFHVSQAAARRMVPRNRGVIITVGSNATGVPRAQMAAYGASKAAATMFTRILGLEVAEHGIRCNIVSPGSTDTEMQRALWTEAGAQPVIDGDLAAHRVGIPLRRIADPADIADAVVFLASDQARHITMQNLYVDGGATLYA

SEQ ID NO: 92017 - protein, 230 aa, Pseudovibrio sp.
  REGION 1..230: note = tr|A0A165VXF0|A0A165VXF0_9RHOB 2,3-dihydro-2,3-dihydroxybenzoate dehydrogenase; OS = Pseudovibrio sp. Ad26 OX=989410 GN=entA PE=4 SV=1
MKKNILIVGGTSGVGLELARHYVEEGHSVGLTGRQNPELEGATFHSLSITDDPVQLAQNIDQVLDGFNNVHTLIYAAGFLQRGHIDELADDQLGTMVNVGLLAPMMLIQRLKRRSDHPLKIMLITSSSQYTPRELEPAYCATKSALGMLGASLVRDKGLGKVLVAAPSGIQTPFWDDTEEDTETMLDSSWVSEQIVELSSGSFKYKFAKLLRDPARVEVVETLDNNLATI

SEQ ID NO: 92018 - protein, 230 aa, Pseudovibrio sp.
  REGION 1..230: note = tr|A0A161UAG8|A0A161UAG8_9RHOB 2,3-dihydro-2,3-dihydroxybenzoate dehydrogenase; OS = Pseudovibrio sp. W74 OX=1735584 GN=entA PE=4 SV=1
MKKNILIVGGTSGVGLELAKHYVKEGHNVGLTGRQNPELEGATFQKFSMTDDPVQLARDIDQVLDGFNNVHTLIYAAGFLQRGHIDELADDQLGTMVNVGLLAPMMLIQRLKRRSDHPLKIMLITSSSQYTPRELEPAYCATKSALGMLGASLVRDKGLGKVLVAAPSGIQTPFWDDTEEDTETMLDPFWVSEQIVELSGGSFKYKFAKLLRDPARVEVVETLDNNLVTI

SEQ ID NO: 92019 - protein, 230 aa, Pseudovibrio sp.
  REGION 1..230: note = tr|A0A166CHE6|A0A166CHE6_9RHOB 2,3-dihydro-2,3-dihydroxybenzoate dehydrogenase; OS = Pseudovibrio sp. WM33 OX=1735585 GN=entA PE=4 SV=1
MKKNILIVGGTSGVGLELARHYLEEGHNVGLTGRQNPELEGTTFHSLSITDDPVQLAQNIDRVLDGFKNVHTLIYAAGFLQRGHIDELADAELGTMVNVGLLAPMMLIQRLKRRSDHPLKIMLITSSSQYTPRELEPAYCATKSALGMLGASLVRDKDLGKVLVVAPSGIQTAFWDNTDEDTDTMLCPSWVSQQIVELSSGSFKYKFAKILRDPARVEIVETLDNNLATI

SEQ ID NO: 92020 - protein, 256 aa, Psychromonas sp.
  REGION 1..256: note = tr|A0A366VY74|A0A366VY74_9GAMM 2,3-dihydro-2,3-dihydroxybenzoate dehydrogenase; OS = Psychromonas sp. B3M02 OX=2267226 GN=DS885_15980 PE=4; SV = 1
MAAQSANSQQWLNKTVWVTGANQGIGAATAEMFLQLGANVIGFDQQFAHPHSQIKQVTLDISNEQAVKEICQSLLETESNVDALVNVAGILQMGKITELSSKQWQRTFDVNVSGAFNVMQQAIPVMKAANTGAIVSVSSNATHMPRMSMAAYSASKAALTNLTMVAGIELAEYGIRCNVVSPGSTQTPMQWSLWQNETGEKSTINGFPEQFKPGIPLGKLATPEDIAETIVFLCSSQANHITLQDIVIDGGATLGK

SEQ ID NO: 92021 - protein, 255 aa, unidentified
  source 1..255: note = Puniceibacterium sp.
  REGION 1..255: note = tr|A0A0J5QDJ6|A0A0J5QDJ6_9RHOB 2,3-dihydro-2,3-dihydroxybenzoate dehydrogenase; OS = Puniceibacterium sp. IMCC21224 OX=1618204; GN = IMCC21224_111858 PE=4 SV=1
MQLTGFDGRIALVTGAGGGIGRATVSALYDAGCTVVATDLPDMLNAAPQQHGVHLRPLDVTDAVAVDALVAEVEAELGPVELFAGTAGILSTQPIAELSAEEWHRVFDVNMHGSFHVTRAVARGMAARQRGAMVVVSSNAGGIPRLNMSAYAASKAALTMYVRCLGLELAPRGIRCNVIAPGSTLTPMQTGMWADASGAEAVIAGSLEGFKTGIPLGKLATSEDIANSVMFLLSEQAGHIAMADLYVDGGATLRG

SEQ ID NO: 92022 - protein, 247 aa, unidentified
  source 1..247: note = Puniceispirillum marinum
  REGION 1..247: note = tr|D5BN97|D5BN97_PUNMI Probable short chain dehydrogenase OS=Puniceispirillum marinum (strain IMCC1322) OX=488538 GN=SAR116_2046 PE=4 SV=1
MKIFIQGAGRGIGLAFARHAFALQQGDDWHMFLTARNPEDSDGFKELPPSANITWMAMDYLDPDSITKAGMTVAAHSDQLDRVISVAGVLRDPTVSPEKRIADLDSAAMLYAYQINAMGPVLLAKALWPLIKGEHPAIFASLSARVGSISDNRLGGWYAYRASKAAQNQLLRTMSIELARYNPHACVVTLHPGTVDTALSKPFQAHVPADKLFTAAYSADCLWRVMDGLDASDTGGFFAYDGSPIDY

SEQ ID NO: 92023 - protein, 261 aa, Pusillimonas ginsengisoli
  REGION 1..261: note = tr|A0A4U5LLN6|A0A4U5LLN6_9BURK 2,3-dihydro-2,3-dihydroxybenzoate dehydrogenase; OS = Pusillimonas ginsengisoli OX=453575 GN=dhbA PE=4 SV=1
MNTANTQEFSQQCVIVSGAGRGIGAAVARQLLDQGARVVALDLDVTPLQSWQTSYPDALHLETVDVADFDAVQQAVDNGTRQLGPVDKLVCAAGVLQMGAITDLRPDQWARTFACNTNGVFNLCHIVAKQMLTRSKGAIVNISSNAATAPRMAMGAYAASKAAVTQLSRCLGLELAHAGIRVNVVSPGSTDTPMQQAMWAAGSSAQAVIDGSGEQYRLGIPLKKIATPDEIADAVLFLLSDRASHITLHDLRVDGGATLDQ

SEQ ID NO: 92024 - protein, 284 aa, Pusillimonas sp.
  REGION 1..284: note = tr|A0A5A9XCN0|A0A5A9XCN0_9BURK 2,3-dihydro-2,3-dihydroxybenzoate dehydrogenase; OS = Pusillimonas sp. ANT_WB101 OX=2597356 GN=dhbA PE=4 SV=1
MCYHRQPARPAIRAARIASPGTRVNAVNTQEFSQQCVVVSGAGRGIGAAVARQLLDQGARVVALDLDITPLQSWQSSYPDALYLETVDVADFNAVAQAVDNGTRQLGPIDKLVCAAGVLQMGAITDLSPDQWARTFACNTNGVFNLCHIVAKQMLTRRKGAIVNISSNAATAPRMAMGAYAASKAAVTQLSRCLGLELAHAGIRVNVVSPGSTDTPMQQAMWAAGSSAQTVIDGSGEHYRLGIPLKKIAMPDEIADAVLFLLSDRASHITLHDLRVDGGATLDQ

SEQ ID NO: 92025 - protein, 252 aa, unidentified
  source 1..252: note = Rahnella inusitata
  REGION 1..252: note = tr|A0A419M8F1|A0A419M8F1_9GAMM 2,3-dihydro-2,3-dihydroxybenzoate dehydrogenase; OS = Rahnella inusitata OX=58169 GN=dhbA PE=4 SV=1
MSTAWDFAGKQVWVTGAGQGIGLHTARAFQQAGATVTGFDKTFSGEDYPFRTEVMDITDSQAVAAVCQRLLAEQPVLDVLVNGAGILRLGATDEISDDDWQSCLAVNAGGAFNLFRHTLPVFRRQQHGAIISIASNAAHVPRVGMSAYCASKAALRSLCLTVGLEMAPFGVRCNLVSPGSTNTPMQQAMWQTHDAEQRTIDGFPDQFKLGIPLGKIALPQEVAEAVLFLASGSASHITMQDIVIDGGATLGA

SEQ ID NO: 92026 - protein, 251 aa, unidentified
  source 1..251: note = Raoultella electrica
  REGION 1..251: note = tr|A0A514EUN8|A0A514EUN8_9ENTR 2,3-dihydro-2,3-dihydroxybenzoate dehydrogenase; OS = Raoultella electrica OX=1259973 GN=entA PE=4 SV=1
MAALDFQGQTVWVTGAGKGIGYATALAFVEAGARVSGFDLAFEGDDYPFATHTLDVANAQQVAGVCGHLLQGIDRLDVLVNAAGILRMGATDELSLDAWQQTFAVNVGGAFNLFQQTMGQFRRQQGGAIVTVASDAAHTPRIGMSAYGASKAALKSLALTVGLELAGSGVRCNLVSPGSTDTDMQRTLWLSEDAEQRRIRGFGEQFKLGIPLGKIARPQEIASTILFLASDHASHITLQDIVVDGGSTLGA

SEQ ID NO: 92027 - protein, 251 aa, Raoultella ornithinolytica
  REGION 1..251: note = tr|A0A1Y6GP98|A0A1Y6GP98_RAOOR 2,3-dihydro-2,3-dihydroxybenzoate dehydrogenase; OS = Raoultella ornithinolytica OX=54291 GN=entA PE=4 SV=1
MAALDFQGQTVWVTGAGKGIGYATALAFVEAGARVSGFDLAFEGDDYPFATHTLDVANAQQVAEVCGHLLKGIDRLDVLVNAAGILRMGATDELSLDAWQQTFAVNVGGAFNLFQQTMGQFRRQQGGAIVTVASDAAHTPRIGMSAYGASKAALKSLALTVGLELAGSGVRCNLVSPGSTDTDMQRTLWVSEDAEQRRIRGFGEQFKLGIPLGKIARPQEIASTILFLASDHASHITLQDIVVDGGSTLGA

SEQ ID NO: 92028 - protein, 266 aa, Raoultella planticola
  REGION 1..266: note = tr|A0A2X2E4I5|A0A2X2E4I5_RAOPL 2,3-dihydro-2,3-dihydroxybenzoate dehydrogenase; OS = Raoultella planticola OX=575 GN=dhbA PE=4 SV=1
MLVKDKVAAIFGGSGAIGSAVAHAMAREGARVYLGARDRQKLDRVAGEIRAAGGRAETFIVDLLDERSTAERIAQLTQQSGGLDIVVNATGFVHNQGKEITTLSLAEFMQGITPFLAAQFNLAKAVTPYMGGARPGAIITVVAPAATMAMPGHLGHIVGCAGSEAFIKALASELGPKNIRVLGVRSHAITGAVEAGSYTAEVFAAKAQAMGLTVEQWVGGAAHSTMLKRLPTLAQVADVITFLASDRADAMTATVVNMTAGATTGG

SEQ ID NO: 92029 - protein, 251 aa, Raoultella sp.
  REGION 1..251: note = tr|A0A509CMD3|A0A509CMD3_9ENTR 2,3-dihydroxybenzoate-2,3-dehydrogenase OS=Raoultella sp. NCTC 9189 OX=2583577 GN=entA PE=4 SV=1
MAALDFQGQTVWVTGAGKGIGYATALAFVEAGAQVTGFDLAFAGESYPFATETLDVADAPQVAEVCQRLLGGIERLDVLVNAAGILRMGATDALSVEEWQQTFAVNVGGAFNLFQQTMAQFRRQRGGAIVTVASDAAHTPRIGMSAYGASKAALKSLALTVGLELAGSGVRCNLVSPGSTDTDMQRTLWVSDDAEQQRIRGFGEQFKLGIPLGKIARPQEIASTILFLASHHASHITLQDIVVDGGSTLGA

SEQ ID NO: 92030 - protein, 108 aa, Raoultella terrigena
  REGION 1..108: note = tr|A0A3P8L0X5|A0A3P8L0X5_RAOTE 2,3-dihydro-2,3-dihydroxybenzoate dehydrogenase; OS = Raoultella terrigena OX=577 GN=entA_1 PE=4 SV=1
MSAYGASKAALKSLALTVGLELAGSGVRCNLVSPGSTDTDMQRTLWVSDDAEQQRIRGFGEQFKLGIPLGKIARPQEIASTILFLASHHASHITLQDIVVDGGSTLGA

SEQ ID NO: 92031 - protein, 251 aa, Rhizobium radiobacter; identical to SEQ ID NO: 91459
  REGION 1..251: note = tr|A0A5B1AC60|A0A5B1AC60_RHIRD 2,3-dihydro-2,3-dihydroxybenzoate dehydrogenase; OS = Rhizobium radiobacter OX=358 GN=dhbA PE=4 SV=1

SEQ ID NO: 92032 - protein, 251 aa, Rhizobium sp.
  REGION 1..251: note = tr|A0A4U6RBU3|A0A4U6RBU3_9RHIZ 2,3-dihydro-2,3-dihydroxybenzoate dehydrogenase; OS = Rhizobium sp. AU243 OX=2303425 GN=D0C28_22555 PE=4 SV=1
MTQQRFTGRRVLVTGTAQGIGRRIAERFIEEGAEVIGLDLLADTVEAPFRQIALDITDAAAVETTCRAIESEWGGLDILVNAAGILRLGDSESLTPADWKACMDVNAAGPFYMLRQWSGAFKRQRRGAIVNVGSNAAVVPRIGMMAYCASKAALVSLSHCAALELAPYGVRCNVVSPGSTDTPMLAGMLSDPSGKDQLVAGLPEQFKLGIPLGKIARPDDIADTVLFLASDQAGHVTMQQIVVDGGATLAA

SEQ ID NO: 92033 - protein, 251 aa, Rhizobium sp.; identical to SEQ ID NO: 91561
  REGION 1..251: note = tr|U4PYF9|U4PYF9_9RHIZ 2,3-dihydro-2,3-dihydroxybenzoate dehydrogenase; OS = Rhizobium sp. IRBG74 OX=424182 GN=entA PE=4 SV=1

SEQ ID NO: 92034 - protein, 248 aa, unidentified
  source 1..248: note = Rhodobacteraceae bacterium
  REGION 1..248: note = tr|A0A418SHB0|A0A418SHB0_9RHOB 2,3-dihydro-2,3-dihydroxybenzoate dehydrogenase; OS = Rhodobacteraceae bacterium Lw-13e OX=1537215 GN=entA; PE = 3 SV=1
MKTVLITGCSSGFGLETARHFLERDWRVIATMRSPRADLLPASDRLTVPPLDVTDPDSIARLVDGVGQVDALVNNAGIGLMGAVEATPPETMRQIFETNTFGTMALTRALLPQFREAGAGTIVNVTSSVTITPLPLLAIYTASKAAVAAYSDCLALEMAQFGVSVRLVLPGRSSTRFAENARPLMQGLVPDSYADFAQRTFGAMAGAVSPTRPEDVVSAIWRAVTDPDCPAHQPAGEDAVAALEGTAT

SEQ ID NO: 92035 - protein, 256 aa, Rhodococcus coprophilus
  REGION 1..256: note = tr|A0A2X4X5B7|A0A2X4X5B7_9NOCA 2,3-dihydro-2,3-dihydroxybenzoate dehydrogenase; OS = Rhodococcus coprophilus OX=38310 GN=dhbA PE=4 SV=1
MSAPVTLVVGAAQGIGRATALTLSRAGHRPVLLDRDSDGLRKTAALIGDDIPVYPVDVRDADAIEFAVGSIESDHGPIERLAHVAGVFTTGSVLDSDPDDWQRMFDVNVTGLLSVLRAVGRVMRQRRSGAIVVVGSNSAGVPRMGMGAYGSSKAAAAMIVRVAGLELAQYGIRANIVAPGSTDTAMQRSLWEDPDDDAGAHSAIDGDPAQFKVGIPLGRIADPSDIADSIEFLLSDRARHITMQALYVDGGATLRA

SEQ ID NO: 92036 - protein, 263 aa, Rhodococcus erythropolis
  REGION 1..263: note = tr|C0ZYH0|C0ZYH0_RHOE4 2,3-dihydro-2,3-dihydroxybenzoate dehydrogenase; OS = Rhodococcus erythropolis (strain PR4 / NBRC 100887); OX = 234621 GN=RER_26970 PE=4 SV=1
MSERRIAVVTGAAAGIGAAVARTLARDGYSLALLDRDDVELKRVTAELAETIVEGADIESHVVDVTDRQAVDAAVASTMDTFGRIDALAHVAGILDTGSVLDSDPDQWRKIFGVNVFGLLNVLQSVGLEMRRRRAGAIVVVSSNAAGVPRIGMGAYGSSKAAATMLVRTAGLELAADGIRVNVVAPGSTDTAMQRSLWSDPSDDSGADAVIEGNLASYRLGIPLGKLATADDIAESVHFLLSDRAAHITMQALYVDGGATLKA

SEQ ID NO: 92037 - protein, 226 aa, Rhodococcus erythropolis
  REGION 1..226: note = tr|A0A1F2PXE5|A0A1F2PXE5_RHOER 2,3-dihydro-2,3-dihydroxybenzoate dehydrogenase; OS = Rhodococcus erythropolis OX=1833 GN=dhbA_3 PE=4 SV=1
MGIGAAIAEELARQGAHVALVARGRAALNDKVAQIGQRAHAYPCDMRDPEAITAMVASVERDLGPVSILVNNVGAGTFKPLQQIDARQISTTVFRSVPIGSRHRVLRAQRRRYGLVSPDVFLVSRPETGSGRSANGPCDTQKPAGGHLPLAAGTDHMAVQAVSGHRIGSAQSSGIVSATPHPADGRSSHSRRSVLTGDSSCPAPLCSPASLYPRTCLALGGSSRCT

SEQ ID NO: 92038 - protein, 266 aa, Rhodococcus erythropolis
  REGION 1..266: note = tr|C3JKH8|C3JKH8_RHOER Putative 2,3-dihydroxybenzoate-2,3-dehydrogenase OS=Rhodococcus erythropolis SK121 OX=596309 GN=RHOER0001_5832 PE=4 SV=1
MPAVSERRIAVVTGAAAGIGAAVARTLARDGYSLALLDRDDVELKRVTAELAETIVEGADIESHVVDVTDRQAVDAAVASTMDTFGRIDALAHVAGILDTGSVLDSDPDQWRKIFGVNVFGLLNVLQSVGLEMRRRRAGAIVVVSSNAAGVPRIGMGAYGSSKAAATMLVRTAGLELATDGIRVNVVAPGSTDTAMQRSLWSDPSDDSGADAVIEGNLASYRLGIPLGKLATADDIADSVHFLLSDRAAHITMQALYVDGGATLKA

SEQ ID NO: 92039 - protein, 221 aa, Rhodococcus fascians
  REGION 1..221: note = tr|A0A165LJA8|A0A165LJA8_RHOFA 2,3-dihydro-2,3-dihydroxybenzoate dehydrogenase; OS = Rhodococcus fascians D188 OX=1051973 GN=dhbA PE=4 SV=1
MTSIAIVGAGAGLGAAVARKFGAQGFSVGLISRNRSRVDALADQLAADGVSAKGFVADVRDPASIAAALEQVTETLGPIEVLQYSPLPQKDFMRPVLETTPADMVGPVEFSIYGPIAAVHQVLPGMRFLGENKGTILFVNGGSAVKPGRTVTGTSIAFAGQAAYAQLLNEELADEGIQVSQLIIGGAIDGKDPKKSPEALAEQLWSLHTKRDRFRVQVATD

SEQ ID NO: 92040 - protein, 267 aa, Rhodococcus gordoniae
  REGION 1..267: note = tr|A0A379M2V6|A0A379M2V6_9NOCA 2,3-dihydro-2,3-dihydroxybenzoate dehydrogenase; OS = Rhodococcus gordoniae OX=223392 GN=dhbA PE=4 SV=1
MTETPAPQSPAPRDPVTLVVGAAQGIGRATAETLARAGHRLVLVDRNAEGLGRTAALLGDSVPTYAVDIRDHDAVAYAVDSIESEHGPIEHLAHVAGVFTTGSVLDSDPEDWQHMFDVNVTGLLSVLRSVGRAMRERQSGSIVVVGSNSAGVPRMGMGAYGSSKAAATMIVRILGLELGPYGIRANIVAPGSTDTAMQRSLWADPNDDTGARGAIEGDLSQFKVGIPLGRIAEPTDIAEAIEFLLSDRARHITMQALYVDGGATLRA

SEQ ID NO: 92041 - protein, 256 aa, Rhodococcus jostii
  REGION 1..256: note = tr|Q0S7A7|Q0S7A7_RHOJR 2,3-dihydro-2,3-dihydroxybenzoate dehydrogenase; OS = Rhodococcus jostii (strain RHA1) OX=101510 GN=dhbA PE=4; SV = 1
MSGTTLVVGAAQGIGRATAVTLSRSGHRLVLLDRDADGLAATAALLDTPPLGTAVTDIRDTDAVTDTVRRIEDEHGPITALAHVAGVLETGSVLDADPESWQRVFDVNVTGLVNVLRAVGTGMRERAAGSIVVVGSNAAGVPRTGMGAYGASKAAVSMIVRVLGLELAEYGIRANIVAPGSTDTAMQRSLWADPADDTGARGAIDGDLGTFKVGIPLGRIADAADIADSVEFLLSERARHITMQALYVDGGATLRA

SEQ ID NO: 92042 - protein, 256 aa, Rhodococcus opacus
  REGION 1..256: note = tr|C1AT68|C1AT68_RHOOB 2,3-dihydro-2,3-dihydroxybenzoate dehydrogenase; OS = Rhodococcus opacus (strain B4) OX=632772 GN=ROP_48850; PE = 4 SV=1
MSGTTLIVGAAQGIGRATAVTLSRSGHRLVLLDRDAEGLAATAALLDTPPLGTAVTDIRDTAAVTDTVRRIEDEHGPVTALAHVAGVLETGSVLDADPASWQRVFDVNVTGLVNVLRAVGTGMRDRSAGSIVVVGSNAAGVPRTGMGAYGASKAAVAMIVRVLGLELAEYGIRANIVAPGSTDTAMQRSLWSDPSDDTGARGAIDGDLGSFKVGIPLGRIADAADIADSVEFLLSDRARHITMQALYVDGGATLQA

SEQ ID NO: 92043 - protein, 266 aa, Rhodococcus qingshengii
  REGION 1..266: note = tr|A0A4S5DYM1|A0A4S5DYM1_9NOCA 2,3-dihydro-2,3-dihydroxybenzoate dehydrogenase; OS = Rhodococcus qingshengii OX=334542 GN=EU244_32080 PE=4; SV = 1
MPAVSERRIAVVTGAAAGIGAAVARTLARDGYSLALLDRDDVELKRVTAELAETIVEGADIESHVVDVTDRQAVDAAVASTMDTFGRIDALAHVAGILDTGSVLDSDPDQWRKIFGVNVFGLLNVLQSVGLEMCRRRAGAMVVVSSNAAGVPRIGMGAYGSSKAAATMLVRTAGLELAADGIRVNVVAPGSTDTAMQRSLWSDPSDDSGADAVIEGNLASYRLGIPLGKLATADDIADSVHFLLSDRAAHITMQALYVDGGATLKA

SEQ ID NO: 92044 - protein, 256 aa, Rhodococcus rhodochrous
  REGION 1..256: note = tr|W3ZZV2|W3ZZV2_RHORH 2,3-dihydro-2,3-dihydroxybenzoate dehydrogenase; OS = Rhodococcus rhodochrous ATCC 21198 OX=1429046; GN = RR21198_4492 PE=4 SV=1
MSRSVTLVVGAAQGIGRATALTLAKAGHRVVLADRDVDGLAETAALLDVAAPVHGLDVCDAAGVAEAVARVEAEHGPVDALAHVAGVFTTGSVLDSDPAEWQRMFDVNVTGLINVLRVVGRGMRERRRGAIVTVGSNSAGVPRAGMGAYGASKSAAHMIVRVLGLELARFGVRANVVAPGSTDTAMQRSLWPDPADDAGARTAIDGDAASFKVGIPLGRIADPADIADAVEFLLSDRARHITMQTLYVDGGATLRA

SEQ ID NO: 92045 - protein, 260 aa, Rhodococcus rhodochrous
  REGION 1..260: note = tr|A0A385LB65|A0A385LB65_RHORH 2,3-dihydro-2,3-dihydroxybenzoate dehydrogenase; OS = Rhodococcus rhodochrous OX=1829 GN=C6369_011865 PE=4; SV = 1
MTETAPSPVTLVVGAAQGIGRATAEALARAGHRLVLADRNAEGLRKTAALLGGSVPTYPVDIRDHDAVAYVVESIESEHGPIEHLAHVAGVFTTGSVLDSDPEDWQHMYDVNVTGLLSVLRSVGRAMRERRSGSIVVVGSNSAGVPRMGMGAYGSSKAAATMIVRILGLELAQYGIRANIVAPGSTDTAMQRSLWEDPNDDAGARSAIEGDLSQFKVGIPLGRIAEPADIAEAIEFLLSDRARHITMQALYIDGGATLRA

SEQ ID NO: 92046 - protein, 256 aa, Rhodococcus ruber
  REGION 1..256: note = tr|A0A098BRE9|A0A098BRE9_9NOCA 2,3-dihydro-2,3-dihydroxybenzoate dehydrogenase; OS = Rhodococcus ruber OX=1830 GN=entA PE=4 SV=1
MSRSVTLVVGAAHGIGRATARTLAGAGHRVVLADRDLDGLAETAALLDVPAPVHGLDVCDAAAVAEAVARVEAEHGPVDALAHVAGVFTTGSVLDCDPAEWRKMFDVNVTGLVNVLRVVGRGMRERRRGAIVTVGSNSAGVPRVGMGAYGASKSAAHMIVRVLGLELARFGVRANVVAPGSTDTAMQRSLWPDPGDDAGARTAIDGDATSFKVGIPLGRIAEPADIADAVAFLLSDRARHITMQTLYVDGGATLRA

SEQ ID NO: 92047 - protein, 251 aa, Rhodococcus sp.
  REGION 1..251: note = tr|A0A0D8I367|A0A0D8I367_9NOCA 2,3-dihydro-2,3-dihydroxybenzoate dehydrogenase; OS = Rhodococcus sp. AD45 OX=103808 GN=entA PE=4 SV=1
MDVKGVTGRSVVITGAGGGIGAATAALFEEAGATVARWDLAAPTVPVGGFVLAVDVTDRQSVEQAFAATTDAIGTVSALVHTAGVLRAGSALTEDNNDWDACMAVNATGTMNVAREAARRFVAAGAGVITAVGSNAASTPRTNMAAYGASKAAATAYMRSLGLEIAPHGIRCNIISPGSTDTPMLRGMWDGTDQSAGVIAGDADAYRLGIPLGRLAQPGDIAATALFLSSDAARHITMHDLRVDGGATLDM

SEQ ID NO: 92048 - protein, 260 aa, Rhodococcus sp.
  REGION 1..260: note = tr|A0A5A7S7H7|A0A5A7S7H7_9NOCA 2,3-dihydro-2,3-dihydroxybenzoate dehydrogenase; OS = Rhodococcus sp. C1-24 OX=2495913 GN=FOY51_21240 PE=3; SV = 1
MNGPRQNSTSGRIALVTGAAGGIGRRIVHRLAAEGMTVVAVDRAADALEGLHSIPGHILTKQGDVTDAGQVEAIVSDVERDIGPLDYLVNAVGILRVGELVELSDKDWDDMFAVNTNSVFLVTRTVAARMIPRRRGAIVTVSSNAAHTPRASMSAYSASKAAATMLARCAALEFAKYGIRCNVVSPGSTDTEMLQVSWEYEDRSAATIAGVPEQFRLGIPLGRIADADDIVDAVEFLLSDKAKHITMQQLTVDGGATLGV

SEQ ID NO: 92049 - protein, 256 aa, Rhodococcus sp.
  REGION 1..256: note = tr|N1LZP2|N1LZP2_9NOCA 2,3-dihydro-2,3-dihydroxybenzoate dehydrogenase; OS = Rhodococcus sp. EsD8 OX=1301088 GN=EBESD8_5920 PE=4 SV=1
MSRSVTLVVGAAQGIGRATALTLAKAGHRVVLADRDVDGLAETAALLDVAAPVHGLDVCNAAGVAEAVARVEAEHGPVDALAHVAGVFTTGSVLDSDPAEWQRMFDVNVTGLINVLRVVGRGMRERRRGAIVTVGSNSAGVPRAGMGAYGASKSAAHMIVRVLGLELARFGVRANVVAPGSTDTAMQRSLWPDPADDAGARTAIDGDAASFKVGIPLGRIADPADIADAVEFLLSDRARHITMQTLYVDGGATLRA

SEQ ID NO: 92050 - protein, 266 aa, Rhodococcus sp.; identical to SEQ ID NO: 92038
  REGION 1..266: note = tr|A0A3G8ZXV1|A0A3G8ZXV1_9NOCA 2,3-dihydro-2,3-dihydroxybenzoate dehydrogenase; OS = Rhodococcus sp. NJ-530 OX=2490853 GN=EHW12_13225 PE=4; SV = 1

SEQ ID NO: 92051 - protein, 221 aa, Rhodococcus sp.
  REGION 1..221: note = tr|A0A143QJP4|A0A143QJP4_9NOCA 2,3-dihydro-2,3-dihydroxybenzoate dehydrogenase; OS = Rhodococcus sp. PBTS 2 OX=1653479 GN=dhbA PE=4 SV=1
MTSIAIVGAGAGLGAAVARKFGAQGFSVGLISRNRSRVDALADQLAAEGVSAKGFVADVRDPASIAAALEQVTETLGPIEVLQYSPLPQKDFMRPVLETTPADMVGPVEFSIYGPIAAVHQVLPGMRFLGKNKGTILFVNGGSAVKPGRTVTGTSIAFAGQAAYAQLLNEELAAEGIQVSQLIIGGAIDGKDPKKSPEALAEQLWSLHTERDRFRVQVATD

SEQ ID NO: 92052 - protein, 257 aa, Rhodococcus sp.
  REGION 1..257: note = tr|A0A0K2YDM6|A0A0K2YDM6_9NOCA 2,3-dihydro-2,3-dihydroxybenzoate dehydrogenase; OS = Rhodococcus sp. RD6.2 OX=260936 GN=dhbA PE=4 SV=1
MAVEGVTGRSVLVTGAAGGIGAAVARLLESVGATVARWDLAGEADADLHAGEALAVDVTDIDAVVAAYDATEAAVGPIAILVHAAGVLRTGSGMDLGDDWDACMAVNATGTRNVAGEAARRLIAAVRAGAQPGVIVGVSSNAAATPRTSMAAYGASKAAATAYLRSLGLELAPHGIRCNVVSPGSTDTPMLRGMWSGDDESPAVIAGDAASFRLGIPLGRIARPEDIAQTVLFLCSDAARHVTLHDLRVDGGATLDM

SEQ ID NO: 92053 - protein, 307 aa, Rhodococcus sp.
  REGION 1..307: note = tr|A0A4P8PW07|A0A4P8PW07_9NOCA 2,3-dihydro-2,3-dihydroxybenzoate dehydrogenase; OS = Rhodococcus sp. SGAir0479 OX=2567884 GN=E7742_00165; PE = 4 SV=1
MDGGHPLRRDQQRSTPGHHVCGRWHRRRVRSGGRTTRDGDQVRYRHERTGSATVTISLVVGAGHGIGRAVALTLARAGRKVALADADAAGLADTARQLGGGVLTHTVDIRDPEAVAATVAETEQSAGPITELAHVAGILETGSVLDSDPADWRNVFDVNLFGLLNVVRPVGRAMRERRSGAIVVVGSNSAGVPRMSMGAYGSSKAASTMLTRVLGLELARYGVRANIVAPGSTDTDMQRSLWADPEDEAGARGAIDGDLSSYKVGIPLGRIATPSDIAETVEFLLSDRARHITMQSVYVDGGATLRA

SEQ ID NO: 92054 - protein, 266 aa, Rhodococcus sp.
  REGION 1..266: note = tr|A0A4Y7AY65|A0A4Y7AY65_9NOCA 2,3-dihydro-2,3-dihydroxybenzoate dehydrogenase; OS = Rhodococcus sp. WS1 OX=1882743 GN=EEB12_02775 PE=4 SV=1
MPAVSDRRIAVVTGAAAGIGAAVARTLARDGYSLALLDRDDVELKRATAELAETIVEGADIESHVVDVTDRQAVDAAVASTMDTFGRIDALAHVAGILDTGSVLDSDPDQWRKIFGVNVFGLLNVLQSVGLEMRRRRAGSIVVVSSNAAGVPRIGMGAYGSSKAAATMLVRTAGLELAVDGIRVNVVAPGSTDTAMQRSLWSDPSDDSGADAVIEGDLAGYRLGIPLGKLATADDIADSVHFLLSDRAAHITMQALYVDGGATLKA

SEQ ID NO: 92055 - protein, 138 aa, Ricinus communis
  REGION 1..138: note = tr|B9TA10|B9TA10_RICCO 3-oxoacyl-[acyl-carrier-protein] reductase, putative; OS = Ricinus communis OX=3988 GN=RCOM_0389200 PE=4 SV=1
MKQQRLGGSIVFVGSKNGLVASAGASAYCTAKAAEIHLARCIALEGAEHGIRVNVVNPDAVIRGSRIWDGKWKEERAASNKIDLDDVEEFYRKRSMLKKSVFPEDIAEAVYFFASEKSGKSTGNVLNVDAGNAAAFTR

SEQ ID NO: 92056 - protein, 253 aa, Roseomonas gilardii
  REGION 1..253: note = tr|A0A379N5M2|A0A379N5M2_9PROT 2,3-dihydro-2,3-dihydroxybenzoate dehydrogenase; OS = Roseomonas gilardii subsp. rosea OX=243956 GN=dhbA PE=4; SV = 1
MRGSGIAGRIALVTGAGGGIGAAVVRALREEGARVVATDLDPAAIAPGEDIRAEALDVTDSAAVEALVERVERDWGPVDLGASVAGVLSTTLVTETTDAEWRRVFAVNAEGVFHVSRALARRMQPRGRGSLVTVSSNAAGIPRHAMAAYAASKAAATMFTRCLGLELAPHGIRCNIVAPGSTLTPMQTGMWSDADGAARVIAGVPEAFKTGIPLGKLATPEDIAEAVVFLLSDRAGHITMTDLYVDGGATMRA

SEQ ID NO: 92057 - protein, 253 aa, Roseomonas mucosa
  REGION 1..253: note = tr|A0A1S8D846|A0A1S8D846_9PROT 2,3-dihydro-2,3-dihydroxybenzoate dehydrogenase; OS = Roseomonas mucosa OX=207340 GN=dhbA PE=4 SV=1
MRGSGIAGRIALVTGAGGGIGAAVVRALREEGARVVATDLDPAAIAPGENIRAEALDVTDSAAVEALVERVERDWGPVDLGASVAGVLSTTLVTETTDAEWRRVFAVNAEGVFHISRALARRMQPRGRGSLVTVSSNAAGIPRHAMAAYAASKAAATMFTRCLGLELAPHGIRCNIVAPGSTLTPMQTGMWSDADGAARVIAGVPEAFKTGIPLGKLATPEDVAEAVVFLLSDRAGHITMTDLYVDGGATMRA

SEQ ID NO: 92058 - protein, 253 aa, Roseomonas sp.; identical to SEQ ID NO: 92057
  REGION 1..253: note = tr|A0A1Q2YXR5|A0A1Q2YXR5_9PROT 2,3-dihydro-2,3-dihydroxybenzoate dehydrogenase; OS = Roseomonas sp. TAS13 OX=1926319 GN=dhbA PE=4 SV=1

SEQ ID NO: 92059 - protein, 253 aa, Roseomonas sp.
  REGION 1..253: note = tr|A0A3A9J8A1|A0A3A9J8A1_9PROT 2,3-dihydro-2,3-dihydroxybenzoate dehydrogenase; OS = Roseomonas sp. Z24 OX=2382222 GN=D6Z83_14380 PE=4 SV=1
MRPSGLSGKRVLVTGAAGGIGQAVLRALLEEGMRVVATDLDPAAIPPAPNLRAERLDVTSSAAVDALVARIEAEEGPIDCGVSLAGILATDTVAQTTDESWRRVFAVNTDGVFHLGRALARVMGPRAAGSIVVVSSNAAGVPRHAMAAYAASKAATTMFTRCLGLELAPQGIRCNIVAPGSTLTPMQTGMWADADGAARVIAGSPETYKAGIPLRKLATPEDIADAVAFLLSDRAGHITMADLYIDGGATLRG

SEQ ID NO: 92060 - protein, 261 aa, unidentified
  source 1..261: note = Roseovarius albus
  REGION 1..261: note = tr|A0A1X6YI69|A0A1X6YI69_9RHOB 2,3-dihydro-2,3-dihydroxybenzoate dehydrogenase; OS = Roseovarius albus OX=1247867 GN=dhbA PE=4 SV=1
MNEISLQGLAIVTGAGQGIGRVIAVRLLQAGCRVLAVGRTQSKLEGLAEEAGVTEDQVTIASVDIQDSSVVEQVVQVAKEQHGEIAYLVNAAGILAPSKLLETGVDALTETIAVNFTSTLVVTQIVARVMAEQKAGAIVTIGSNSGTTPRTGLGAYPASKAGLAHAMKCLGLELAEYGVRCNIVSPGSTDTPMQQSFQTSASGLDRVLKGDANLWRLGIPLGRMADPQDVANIVLFLLSDMARHITMENIVIDGGATLGAR

SEQ ID NO: 92061 - protein, 249 aa, Roseovarius mucosus
  REGION 1..249: note = tr|A0A1V0RRS5|A0A1V0RRS5_9RHOB 2,3-dihydro-2,3-dihydroxybenzoate dehydrogenase; OS = Roseovarius mucosus OX=215743 GN=dhbA PE=3 SV=1
MDMQGKCVLITGASKGIGAAAARVFAAAGAQVALVARNAEAIAELAGEIGPSAIAIPCDVSRYWEMEAAVAACHTAFGQLDVLINNAGVIEPITSLSEADPEAWARAIDINLKGVFNGMRAALPGMITRGSGSILTVSSGAAHSPLEGWSAYCTSKAGAAMLTRCADLEAASAGVRIMGLSPGTVATDMQREIKASGVNPVSQLDWSIHIPADWPARALLWMCSPDAAEFAGQEISLRDEAIRRRVGLI

SEQ ID NO: 92062 - protein, 249 aa, Roseovarius sp.
  REGION 1..249: note = tr|A0A5E7ZJN3|A0A5E7ZJN3_9RHOB 2,3-dihydro-2,3-dihydroxybenzoate dehydrogenase; OS = Roseovarius sp. EC-HK134 OX=2038394 GN=dhbA PE=3 SV=1
MDMQGKCVLITGASKGIGAAAARVFAAAGAQVALVARNAEAIAELAGEIGPSAIAIPCDVSRYWEMEAAVAACHTAFGQLDVLINNAGVIEPITSLSEADPEAWARAIDINLKGVFNGMRAALPGMITRGSGSILTVSSGAAHSPLEGWSAYCTSKAGAAMLTRCADLEAASAGVRIMGLSPGTVATDMQREIKASGVNPVSQLDWSIHIPADWPARALLWMCSPDAAEFAGQEISLRDEAIRRRVGLV

SEQ ID NO: 92063 - protein, 249 aa, Roseovarius sp.; identical to SEQ ID NO: 92062
  REGION 1..249: note = tr|A0A5E7ZP09|A0A5E7ZP09_9RHOB 2,3-dihydro-2,3-dihydroxybenzoate dehydrogenase; OS = Roseovarius sp. EC-SD190 OX=2038395 GN=dhbA PE=3 SV=1

SEQ ID NO: 92064 - protein, 78 aa, Rothia dentocariosa
  REGION 1..78: note = tr|A0A3S4Z1J6|A0A3S4Z1J6_9MICC 2,3-dihydro-2,3-dihydroxybenzoate dehydrogenase OS=Rothia dentocariosa OX=2047 GN=entA PE=4 SV=1
MNTVCPGTTRTPMVTDAWNGEDLSALPVAGSPETFRLGIPLGRIADPADIAAVNAFLISDASRHITMQNIVADGGATF

SEQ ID NO: 92065 - protein, 253 aa, unidentified
  source 1..253: note = Rothia kristinae
  REGION 1..253: note = tr|A0A147E8G2|A0A147E8G2_9MICC 2,3-dihydro-2,3-dihydroxybenzoate dehydrogenase OS=Rothia kristinae OX=37923 GN=entA PE=4 SV=1
MSAVLVTGAAGGIGSQVVRLLAEDGHHVWAADRVMPDPQGWSDPERITPAVLDVSAERDVVDLLRGIEESGQQLTGAVHAAGIVHAAPLLETSVREWDEILAVNARAVFLVLRESAGLMIRQRAQDPGNRRGIVTISSNAGRVPRTEFGAYGASKAAATSVTRSFGLQLARHGIRCNAVSPGTTRTPMVTSGWDGEDRSAVPVAGSPEDFRLGIPLGRIAEPADIAEVARFLVSERARHVSLQDVVVDGGATF

SEQ ID NO: 92066 - protein, 255 aa, Rothia mucilaginosa
  REGION 1..255: note = tr|C6R4B1|C6R4B1_9MICC 2,3-dihydroxybenzoate-2,3-dehydrogenase domain protein; OS = Rothia mucilaginosa ATCC 25296 OX=553201; GN = ROTMU0001_0482 PE=4 SV=1
MSWVIVTGANGGIGEATVQQLIKNGYSVFAADLAEQPIASFGTYGDAIFRYRAVDVTSEESVTALANAVAALDEPITGAVLAAGIAHSQPLLETSFDTWKRLHAVNSDGVFLCLREFARIMIDQQETDPANSRSLVTVASNAARVPRAEFGAYGASKASAARVSSSFGLQLAAHGIRVNSVCPGTTRTPMVTDAWEGEDRSALPVAGNPQTFRLGIPLRRIADPADIAAVNAFLISEAARHITMQEIVADGGATL

SEQ ID NO: 92067 - protein, 259 aa, Rubrivivax sp.
  REGION 1..259: note = tr|A0A519GEZ1|A0A519GEZ1_9BURK 2,3-dihydro-2,3-dihydroxybenzoate dehydrogenase; OS = Rubrivivax sp. OX=50259 GN=EOP38_01155 PE=4 SV=1
MSRFAGRVAVVTGAAQGIGLAVAKALAKEGAKVAMLDQNIDLLTPAAGQLSSQGLQVQPWQVDVRRVDSIAHAVSDVHGQWGGIDILVNVAGVLHAQAVVDTTQEAWMHTFEVNTQGVFSMCAAVVPHMVARRQGCIVTVGSNAASTPRVNMAAYAASKAASAQFTRCLGLELAAHGIRCNIVSPGSTDTPMQRALWHGPDAPGKVIEGNLAQHRLGIPLGRIATPHDVAQAVCFLASDEAKHITLHDLRVDGGATLDA

SEQ ID NO: 92068 - protein, 260 aa, Saccharopolyspora erythraea
  REGION 1..260: note = tr|A4FGF1|A4FGF1_SACEN 2,3-dihydro-2,3-dihydroxybenzoate dehydrogenase; OS = Saccharopolyspora erythraea (strain ATCC 11635 / DSM 40517 / JCM 4748 / NBRC 13426 / NCIMB8594 / NRRL 2338); OX = 405948 GN=dhbA PE=4 SV=1
MDRTGIAGKVALVTGAGRGIGAAVATALSDLGATVAAVDIDADEGTAVAARLAEQGGKAGPYVADVADAASVAGVVDRVERDLGPVDILANVAGVLHPGKVHDLADEDWHRTFAVNTDGVFHLCREVTRRMVPRGRGCVVTVGSNAAGVPRHGMAAYAASKAAATLFTKSLGLELAEHGIRCNVVSPGSTDTDMLRALAGEGDASQVIEGSPETFKVGIPLRKLAAPEDVADAVAFLASDRAGHITMHDLYVDGGATLRA

SEQ ID NO: 92069 - protein, 261 aa, Saccharopolyspora sp.
  REGION 1..261: note = tr|A0A4R4VQI1|A0A4R4VQI1_9PSEU 2,3-dihydro-2,3-dihydroxybenzoate dehydrogenase; OS = Saccharopolyspora sp. 16K309 OX=2530384 GN=E1181_09705; PE = 4 SV=1
MNRTGISGKVAIVTGAGQGIGAAVARAFAQLGADVAAVDRNGDKADETVEKLAAEGHRARAYRADVADPAAVTEVVTRVEAEQGPADVLANVAGVLQVATVQELTDAEWQRTFAVNTTGVFNVCREVSKHMISRRRGSIVTVGSNAAGVPRHSMAAYAASKAAATMFTKSLGLELAEYGIRCNIVAPGSTDTDMQRGMWTDGNGPDRVIAGSLETYKAGIPLRKLATPDDIANAVVFLASDEAGHITMHDLYVDGGATLRA

SEQ ID NO: 92070 - protein, 261 aa, Saccharopolyspora sp.
  REGION 1..261: note = tr|A0A4R4U9Z1|A0A4R4U9Z1_9PSEU 2,3-dihydro-2,3-dihydroxybenzoate dehydrogenase; OS = Saccharopolyspora sp. 16K404 OX=2530385 GN=E1161_24075; PE = 3 SV=1
MNRTGISDEVAIVTGAGQGIGAAVARAFAELGAEVAAVDRNGGTAAETAEELAAEGHRVRAYRADVADPAAVTEVVTRVEAEQGPIDVLANVAGVLQVATVQELTDAEWQRTFAVNATGVFNMCREVSKHMISRRRGSIVTVGSNAAGVPRHSMAAYAASKAAATMFTKSLGLELAEYGIRCNIVAPGSTDTDMQRGMWTDGNGPDRVIAGSLETYKAGIPLRKLATPDDIANAVVFLASDEAGHITMHDLYVDGGATMRA

SEQ ID NO: 92071 - protein, 261 aa, Saccharopolyspora sp.
  REGION 1..261: note = tr|A0A4R5BD20|A0A4R5BD20_9PSEU 2,3-dihydro-2,3-dihydroxybenzoate dehydrogenase; OS = Saccharopolyspora sp. 5K548 OX=2530386 GN=E1202_26855; PE = 3 SV=1
MNRTGISGKVAIVTGAGQGIGAAVARAFAQLGADVAVVDRNGDKADETAEALAAEGHRVRAYRADVADPAAVTEVVTRVEAEQGPVDVLANVAGVLQVATVQELTDAEWQRTFAVNTTGVFNVCREVSKHMISRRRGSIVTVGSNAAGVPRHSMAAYAASKAAATMFTKSLGLELAEHGIRCNVVAPGSTDTDMQRGMWTDGNGPDRVIAGSLETYKAGIPLRKLATPDDIANAVVFLASEEAGHITMHDLYVDGGATLRA

SEQ ID NO: 92072 - protein, 261 aa, Saccharopolyspora sp.
  REGION 1..261: note = tr|A0A4R4Z3K5|A0A4R4Z3K5_9PSEU 2,3-dihydro-2,3-dihydroxybenzoate dehydrogenase; OS = Saccharopolyspora sp. 7K502 OX=2530387 GN=E1288_12130; PE = 3 SV=1
MNRTGIGGKVAIVTGAGQGIGAAVTTALAELGATVAAVDRNGEQAEAVAAELTGRGHAVHAYRADVADAAAVNDVVDRVERTHGPIDVLANVAGVLQVGTVQELTDEDWHRTFAVNTTGVFNLSRAVSKHMIGRRRGAIVTVSSNAAGVPRHGMSAYAASKAAATLFTKSLGLELAEFGIRCNVVAPGSTDTEMQRGMWADERGAERVIAGSPETFKAGIPLRKLATPQDIADAVVFLASDQAGHITMHDLYVDGGATLRA

SEQ ID NO: 92073 - protein, 261 aa, Saccharopolyspora sp.
  REGION 1..261: note = tr|A0A426K0K6|A0A426K0K6_9PSEU 2,3-dihydro-2,3-dihydroxybenzoate dehydrogenase; OS = Saccharopolyspora sp. H219 OX=2492662 GN=EIL87_05410; PE = 3 SV=1
MNRTGISGQVAFVTGAGQGIGAAVARAFAELGADVAAVDRDGEKATETAEKLAAEGHRARAYRADVADPAAVAEVVTRVEAEQGPIDVLANVAGVLQVGTVQEITDAEWQRTFAVNTTGVFTVCREVSGHMISRRRGCIVTVGSNAAGVPRHSMAAYAASKAAATMFTKSLGLELAEHGIRCNIVAPGSTDTEMQRGMWTDGSGPERVIAGSPETYKAGIPLRKLATPEDIAHAVVFLAPDEAGHITMHDLYVDGGATLRA

SEQ ID NO: 92074 - protein, 244 aa, Saccharothrix espanaensis
  REGION 1..244: note = tr|K0JVL7|K0JVL7_SACES 2,3-dihydro-2,3-dihydroxybenzoatedehydrogenase; OS = Saccharothrix espanaensis (strain ATCC 51144 / DSM 44229 / JCM 9112 / NBRC 15066 / NRRL 1576 4) OX=1179773; GN = entA PE=4 SV=1
MVDRGIAGRVALVTGAGQGIGAAVAAALAAEGALVADVDLKGATHQVDVSDVDGVDEVVDQVERTLGPISVLVNVAGVLRPGRVLETTDEDWRRTFAVNTDGVFHVSRAVARRMVPRREGAIVTVGSNASGVPRTDMAAYAASKAATTMFTRCLGLELAEHGIRCNVVSPGSTDTAMQRSLWTDDDSPSRVIAGDPATYRVGIPLGRIADPADIADAVLFLVSGQARHITMQNLYVDGGATLRA

SEQ ID NO: 92075 - protein, 251 aa, unidentified
  source 1..251: note = Salmonella abony
  REGION 1..251: note = tr|A0A5H6TEL3|A0A5H6TEL3_SALAB 2,3-dihydro-2,3-dihydroxybenzoate dehydrogenase; OS = Salmonella abony OX=29482 GN=dhbA PE=4 SV=1
MTGFDFSDKTVWVTGAGKGIGYATALAFVDAGARVIGFDREFTQENYPFATEVMDVADAAQVAQVCQRVLQKTPRLDVLVNAAGILRMGATDALSVDDWQQTFAVNVGGAFNLFSQTMAQFRRQQGGAIVTVASDAAHTPRIGMSAYGASKAALKSLALTVGLELAGCGVRCNVVSPGSTDTDMQRTLWVSEDAEQQRIRGFGEQFKLGIPLGKIARPQEIANTILFLASDLASHITLQDIVVDGGSTLGA

SEQ ID NO: 92076 - protein, 251 aa, unidentified
  source 1..251: note = Salmonella agona
  REGION 1..251: note = tr|B5EYI9|B5EYI9_SALA4 2,3-dihydro-2,3-dihydroxybenzoate dehydrogenase; OS = Salmonella agona (strain SL483) OX=454166 GN=entA PE=4; SV = 1
MPCIDFSDKTVWVTGAGKGIGYATALAFVDAGARVIGFDREFTQENYPFATKVMDVADAAQVAQVCQRVLQKTPRLDVLVNAAGILRMGATDALSVDDWQQTFAVNVGGAFNLFSQTMAQFRRQQGGAIVTVASDAAHTPRIGMSAYGASKAALKSLALTVGLELAGCGVRCNVVSPGSTDTDMQRTLWVSEDAEQQRIRGFGEQFKLGIPLGKIARPQEIANTILFLASDLASHITLQDIVVDGGSTLGA

SEQ ID NO: 92077 - protein, 251 aa, unidentified
  source 1..251: note = Salmonella anatum
  REGION 1..251: note = tr|A0A3Y5S9P7|A0A3Y5S9P7_SALAN 2,3-dihydro-2,3-dihydroxybenzoate dehydrogenase; OS = Salmonella anatum OX=58712 GN=ZD17_00390 PE=4 SV=1
MASFDFSDKTVWVTGAGKGIGYATALAFVDAGARVFGFDREFTQENYPFATEVMDVADAAQVAQVCQRVLQKTPRLDVLVNAAGILRMGATDALSVDDWQQTFAVNVGGAFNLFSQTMAQFRRQQGGAIVTVASDAAHTPRIGMSAYGASKAALKSLALTVGLELAGCGVRCNVVSPGSTDTDMQRTLWVSEDAEQQRIRGFGEQFKLGIPLGKIARPQEIANTILFLASDLASHITLQDIVVDGGSTLGA

SEQ ID NO: 92078 - protein, 251 aa, unidentified
  source 1..251: note = Salmonella berta
  REGION 1..251: note = tr|A0A3V6R393|A0A3V6R393_SALBE 2,3-dihydro-2,3-dihydroxybenzoate dehydrogenase; OS = Salmonella berta OX=28142 GN=XR79_10790 PE=4 SV=1
MACIDFSDKTVWVTGAGKGIGYATALAFVDAGARVIGFDREFTQENYPFATEVMDVADAAQVAQVCQRVLQKTPRLDVLVNAAGILRMGATDALSVDDWQQTFAVNVGGAFNLFSQTMAQFRRQQGGAIVTVASDAAHTPRIGMSAYGASKAALKSLALTVGLELAGCGVRCNVVSPGSTDTDMQRTLWVSEDAEQQRIRGFGEQFKLGIPLGKIARPQEIANTILFLASDLASHITLQDIVVDGGSTLGA

SEQ ID NO: 92079 - protein, 251 aa, unidentified
  source 1..251: note = Salmonella blockley
  REGION 1..251: note = tr|A0A5H8HFE6|A0A5H8HFE6_SALBL 2,3-dihydro-2,3-dihydroxybenzoate dehydrogenase; OS = Salmonella blockley OX=57741 GN=dhbA PE=4 SV=1
MPCIDFSDKTVWVTGAGKGIGYATALAFVDAGARVIGFDREFTQENYPFATEVMDVADAAQVAQVCQRVLQKTTRLDVLVNAAGILRMGATDALSVDDWQQTFAVNVGGAFNLFSQTMAQFRRQQGGAIVTVASDAAHTPRIGMSAYGASKAALKSLALTVGLELAGCGVRCNVVSPGSTDTDMQRTLWVSEDAEQQRIRGFGEQFKLGIPLGKIARPQEIANTILFLASDLASHITLQDIVVDGGSTLGA

SEQ ID NO: 92080 - protein, 251 aa, Salmonella bongori
  REGION 1..251: note = tr|A0A5I6N1J5|A0A5I6N1J5_SALBN 2,3-dihydro-2,3-dihydroxybenzoate dehydrogenase; OS = Salmonella bongori CFSAN000510 OX=1299282 GN=dhbA PE=4; SV = 1
MTSVDFSDKTVWVTGAGKGIGYATALAFVDAGARVIGFDREFTQENYPFATEVMDVAEAGQVAQVCQRVLQKTPRLDVLVNAAGILRMGATDALSLDDWQQTFAVNVGGAFNLFSQTMAQFRRQQGGAIVTVASDAAHTPRIGMSAYGASKAALKSLALTVGLELAGSGVRCNVVSPGSTDTDMQRTLWVSEDAEQQRIRGFGEQFKLGIPLGKIARPQEIANTILFLASDLASHITLQDIVVDGGSTLGA

SEQ ID NO: 92081 - protein, 108 aa, Salmonella bongori
  REGION 1..108: note = tr|A0A447M8J8|A0A447M8J8_SALBN 2,3-dihydro-2,3-dihydroxybenzoate dehydrogenase; OS = Salmonella bongori OX=54736 GN=entA_1 PE=4 SV=1
MSAYGASKAALKSLALTVGLELAGSGVRCNVVSPGSTDTDMQRTLWVSEDAEQQRIRGFGEQFKLGIPLGKIARPQEIANTILFLASDLASHITLQDIVVDGGSTLGA

SEQ ID NO: 92082 - protein, 251 aa, Salmonella bongori
  REGION 1..251: note = tr|A0A5I6MPX0|A0A5I6MPX0_SALBN 2,3-dihydro-2,3-dihydroxybenzoate dehydrogenase; OS = Salmonella bongori serovar 48:i:- OX=1173776 GN=dhbA; PE = 4 SV=1
MTGVDFSDKTVWVTGAGKGIGYATALAFVDAGARVIGFDREFTQENYPFATEVMDVAEAGQVAQVCQRLLQKTPRLDVLVNAAGILRMGATDALSLDDWQQTFAVNVGGAFNLFSQTMAQFRRQQGGAIVTVASDAAHTPRIGMSAYGASKAALKSLALTVGLELAGSGVRCNVVSPGSTDTDMQRTLWVSEDAEQQRIRGFGEQFKLGIPLGKIARPQEIANTILFLASDLASHITLQDIVVDGGSTLGA

SEQ ID NO: 92083 - protein, 251 aa, unidentified
  source 1..251: note = Salmonella derby
  REGION 1..251: note = tr|A0A4Z8SVH2|A0A4Z8SVH2_SALDE 2,3-dihydro-2,3-dihydroxybenzoate dehydrogenase; OS = Salmonella derby OX=28144 GN=dhbA PE=4 SV=1
MPCIDFSDKTVWVTGAGKGIGYATALAFVDAGARVIGFDREFTQENYPFATEVMDVADAAQVAQVCQRVLQKTPRLDVLVNAAGILRMGATDALSVDDWQQTFAVNVGGAFNLFSQTMAQFRRQQGGAIVTVASDAAHTPRIGMSAYGASKAALKSLALTVGLELAGCGVRCNVVSPGSTDTDMQRTLWVSEDAEQQRIRGFGEQFKLGIPLGKIARPQEIANTILFLASDLASHITLQDIVVDGGSTLGA

SEQ ID NO: 92084 - protein, 251 aa, unidentified
  source 1..251: note = Salmonella diarizonae
  REGION 1..251: note = tr|A0A3V0PH56|A0A3V0PH56_SALDZ 2,3-dihydro-2,3-dihydroxybenzoate dehydrogenase; OS = Salmonella diarizonae OX=59204 GN=DRK11_11740 PE=4 SV=1
MPGIDFSDQTVWVTGAGKGIGYATALAFVDAGARVIGFDREFTPADYPFTTEVMDVSDAAQVAQVCQRILQKTPRLDVLVNAAGILRMGATDALSVDDWQQTFAVNVGGAFNLFSQTMAQFRRQRGGAIVTVASDAAHTPRIGMSAYGASKAALKSLALTVGLELAGCGVRCNVVSPGSTDTDMQRALWVSEDAEQQRIRGFGEQFKLGIPLGKIARPQEIANTILFLASDLASHITLQDIVVDGGSTLGA

SEQ ID NO: 92085 - protein, 251 aa, unidentified
  source 1..251: note = Salmonella dublin
  REGION 1..251: note = tr|A0A5I6TXB6|A0A5I6TXB6_SALDU 2,3-dihydro-2,3-dihydroxybenzoate dehydrogenase; OS = Salmonella dublin OX=98360 GN=dhbA PE=4 SV=1
MPCIDFSDKTVWVTGAGKGIGYATALAFVDAGARVSGFDREFTQESYPFATEVMDVADAGQVAQVCQRVLQKTPRLDVLVNAAGILRMGATDGLSVDDWQQTFAVNVGGAFNLFSQTMAQFRRQQGGAIVTVASDAAHTPRIGMSAYGASKAALKSLALTVGLELAGCGVRCNVVSPGSTDTDMQRTLWVSEDAEQQRIRGFGEQFKLGIPLGKIARPQEIANTILFLASDLASHITLQDIVVDGGSTLGA

SEQ ID NO: 92086 - protein, 251 aa, Salmonella enterica
  REGION 1..251: note = tr|A0A3U4ISU7|A0A3U4ISU7_SALET 2,3-dihydro-2,3-dihydroxybenzoate dehydrogenase; OS = Salmonella enterica I OX=59201 GN=entA PE=4 SV=1
MTGFDFSDKTVWVTGAGKGIGYATALAFVDAGARVIGFDREFTQENYPFATEVMDVADAGQVAQVCQRVLQKTPRLDVLVNAAGILRMGATDALSVDDWQQTFAVNVGGAFNLFSQTMAQFRRQQGGAIVTVASDAAHTPRIGMSAYGASKAALKSLALTVGLELAGCGVRCNVVSPGSTDTDMQRTLWVSEDAEQQRIRGFGEQFKLGIPLGKIARPQEIANTILFLASDLASHITLQDIVVDGGSTLGA

SEQ ID NO: 92087 - protein, 251 aa, Salmonella enterica
  REGION 1..251: note = tr|A0A3R0BTI8|A0A3R0BTI8_SALER 2,3-dihydro-2,3-dihydroxybenzoate dehydrogenase; OS = Salmonella enterica OX=28901 GN=AIF45_13190 PE=4 SV=1
MAGIDFSGQTVWVTGAGKGIGYATALAFVDAGARVIGFDREFMPADYPFTTEVMDVADAAQVAQVCQRILHNTPRLDVLVNAAGILRMGATDALSVDDWQQTFAVNVGGAFNLFSQTMAQFRRQRGGAIVTVASDAAHTPRIGMSAYGASKAALKSLALTVGLELAGCGVRCNVVSPGSTDTDMQRALWVSEDAEQQRIRGFGEQFKLGIPLGKIARPQEIANTILFLASDLASHITLQDIVVDGGSTLGA

SEQ ID NO: 92088 - protein, 251 aa, Salmonella enterica
  REGION 1..251: note = tr|A0A5I3MFR3|A0A5I3MFR3_SALHO 2,3-dihydro-2,3-dihydroxybenzoate dehydrogenase; OS = Salmonella enterica subsp. houtenae str. CFSAN000557; OX = 1299292 GN=dhbA PE=4 SV=1
MPGIDFSDQTVWVTGAGKGIGYATALAFVDAGARVIGFDREFMPADYPFTTEVMDVADAAQVAQVCQRILHKTPRLDVLVNAAGILRMGATDALSVDDWQQTFAVNVGGAFNLFSQTMAQFRRQQGGVIVTVASDAAHTPRIGMSAYGASKAALKSLALTVGLELAGCGVRCNVVSPGSTDTDMQRALWVSEDAEQQRIRGFGEQFKLGIPLGKIARPQEIANTILFLASDLASHITLQDIVVDGGSTLGA

SEQ ID NO: 92089 - protein, 251 aa, Salmonella enterica
  REGION 1..251: note = tr|A0A379XU94|A0A379XU94_SALER 2,3-dihydro-2,3-dihydroxybenzoate dehydrogenase; OS = Salmonella enterica subsp. indica OX=59207 GN=entA PE=4; SV = 1
MPGIDFSDQTVWVTGAGKGIGYATALAFVDAGARVIGFDREFTPADYPFTTEVMDVADAAQVAQVCQRILHKTPRLDVLVNAAGILRMGATDALSADDWQQTFAVNVGGAFNLFSQTMAQFRRQRGGAIVTVASDAAHTPRIGMSAYGASKAALKSLALTVGLELAGCGVRCNVVSPGSTDTDMQRALWVSEDAEQQRIRGFGEQFKLGIPLGKIARPQEIANTILFLASDLASHITLQDIVVDGGSTLGA

SEQ ID NO: 92090 - protein, 251 aa, Salmonella enterica; identical to SEQ ID NO: 92089
  REGION 1..251: note = tr|V1H543|V1H543_SALER 2,3-dihydroxybenzoate-2,3-dehydrogenase OS=Salmonella enterica subsp. indica serovar 6,14,25:z10:1,(2),7 str. 1121 OX=1173950 GN=SEI61121_0310 5 PE=4 SV=1

SEQ ID NO: 92091 - protein, 251 aa, Salmonella enterica
  REGION 1..251: note = tr|A0A344R4K0|A0A344R4K0_SALER 2,3-dihydro-2,3-dihydroxybenzoate dehydrogenase; OS = Salmonella enterica subsp. salamae OX=59202; GN = AC322_03380 PE=4 SV=1
MAGIDFSDQTVWVTGAGKGIGYATALAFVDAGARVIGFDREFMPADYPFTTEVMDVADAAQVAQVCQRILHNTPRLDVLVNAAGILRMGATDALSVDDWQQTFAVNVGGAFNLFSQTMAQFRRQRGGAIVTVASDAAHTPRIGMSAYGASKAALKSLALTVGLELAGCGVRCNVVSPGSTDTDMQRALWVSEDAEQQRIRGFGEQFKLGIPLGKIARPQEIANTILFLASDLASHITLQDIVVDGGSTLGA

SEQ ID NO: 92092 - protein, 251 aa, Salmonella enterica; identical to SEQ ID NO: 92091
  REGION 1..251: note = tr|A0A5I3P2C0|A0A5I3P2C0_SALER 2,3-dihydro-2,3-dihydroxybenzoate dehydrogenase; OS = Salmonella enterica subsp. salamae str. CFSAN000559; OX = 1299293 GN=dhbA PE=4 SV=1

SEQ ID NO: 92093 - protein, 251 aa, unidentified
  source 1..251: note = Salmonella enteritidis
  REGION 1..251: note = tr|A0A4U8AYZ3|A0A4U8AYZ3_SALEN 2,3-dihydro-2,3-dihydroxybenzoate dehydrogenase; OS = Salmonella enteritidis OX=149539 GN=dhbA PE=4 SV=1
MACIDFSDKTVWVTGAGKGIGYATALAFVDAGARVIGFDSEFTQENYPFATEVMDVADAAQVAQVCQRVLQKTPRLDVLVNAAGILRMGATDALSVDDWQQTFAVNVGGAFNLFSQTMAQFRRQQGGAIVTVASDAAHTPRIGMSAYGASKAALKSLALTVGLELAGCGVRCNVVSPGSTDTDMQRTLWVSEDAEQQRIRGFGEQFKLGIPLGKIARPQEIANTILFLASDLASHITLQDIVVDGGSTLGA

SEQ ID NO: 92094 - protein, 251 aa, unidentified; identical to SEQ ID NO: 92078
  source 1..251: note = Salmonella gallinarum
  REGION 1..251: note = tr|A0A3V9NIE1|A0A3V9NIE1_SALGL 2,3-dihydro-2,3-dihydroxybenzoate dehydrogenase; OS = Salmonella gallinarum OX=594 GN=dhbA PE=4 SV=1

SEQ ID NO: 92095 - protein, 251 aa, unidentified
  source 1..251: note = Salmonella hadar
  REGION 1..251: note = tr|A0A4V2HYV2|A0A4V2HYV2_SALHA 2,3-dihydro-2,3-dihydroxybenzoate dehydrogenase; OS = Salmonella hadar OX=149385 GN=dhbA PE=4 SV=1
MPCIDFSDKTVWVTGAGKGIGYATALAFVDAGARVIGFDREFTQENYPFATEVMDVADAAQVAQVCQRVLQKTPRLDVLVNAAGILRIGATDALSVDDWQQTFAVNVGGAFNLFSQTMAQFRRQQGGAIVTVASDAAHTPRIGMSAYGASKAALKSLALTVGLELAGCGVRCNVVSPGSTDTDMQRTLWVSEDAEQQRIRGFGEQFKLGIPLGKIARPQEIANTILFLASDLASHITLQDIVVDGGSTLGA

SEQ ID NO: 92096 - protein, 251 aa, unidentified; identical to SEQ ID NO: 92088
  source 1..251: note = Salmonella houtenae
  REGION 1..251: note = tr|A0A1J6YDS2|A0A1J6YDS2_SALHO 2,3-dihydro-2,3-dihydroxybenzoate dehydrogenase; OS = Salmonella houtenae OX=59205 GN=dhbA PE=4 SV=1

SEQ ID NO: 92097 - protein, 251 aa, unidentified; identical to SEQ ID NO: 92075
  source 1..251: note = Salmonella infantis
  REGION 1..251: note = tr|A0A3R0DE08|A0A3R0DE08_SALIN 2,3-dihydro-2,3-dihydroxybenzoate dehydrogenase; OS = Salmonella infantis OX=595 GN=dhbA PE=4 SV=1

SEQ ID NO: 92098 - protein, 251 aa, unidentified
  source 1..251: note = Salmonella montevideo
  REGION 1..251: note = tr|A0A3A3KR88|A0A3A3KR88_SALMO 2,3-dihydro-2,3-dihydroxybenzoate dehydrogenase; OS = Salmonella montevideo OX=115981 GN=dhbA PE=4 SV=1
MASFDFSDKTVWVTGAGKGIGYATALAFVDAGARVFGFDREFTQENYPFATEVMDVADAAQVAQVCQRVLQKTPRLDVLVNAAGILRMGATDALSVDDWQQTFAVNVGGAFNLFSQTMTQFRRQQGGAIVTVASDAAHTPRIGMSAYGASKAALKSLALTVGLELAGCGVRCNVVSPGSTDTDMQRTLWVSEDAEQQRIRGFGEQFKLGIPLGKIARPQEIANTILFLASDLASHITLQDIVVDGGSTLGV

SEQ ID NO: 92099 - protein, 251 aa, unidentified; identical to SEQ ID NO: 92078
  source 1..251: note = Salmonella moscow
  REGION 1..251: note = tr|A0A5H7LHQ5|A0A5H7LHQ5_SALMC 2,3-dihydro-2,3-dihydroxybenzoate dehydrogenase; OS = Salmonella moscow OX=28146 GN=dhbA PE=4 SV=1

SEQ ID NO: 92100 - protein, 251 aa, unidentified
  source 1..251: note = Salmonella muenchen
  REGION 1..251: note = tr|A0A3T3ES78|A0A3T3ES78_SALMU 2,3-dihydro-2,3-dihydroxybenzoate dehydrogenase; OS = Salmonella muenchen OX=596 GN=dhbA PE=4 SV=1
MTGFDFSDKTVWVTGAGKGIGYATALAFVDAGARVIGFDREFTQENYPFATEVMDVADAAQVAQVCQRVLQKTTRLDVLVNAAGILRMGATDALSVDDWQQTFAVNVGGAFNLFSQTMAQFRRQQGGAIVTVASDAAHTPRIGMSAYGASKAALKSLALTVGLELAGCGVRCNVVSPGSTDTDMQRTLWVSEDAEQQRIRGFGEQFKLGIPLGKIARPQEIANTILFLASDLASHITLQDIVVDGGSTLGA

SEQ ID NO: 92101 - protein, 251 aa, unidentified; identical to SEQ ID NO: 92083
  source 1..251: note = Salmonella muenster
  REGION 1..251: note = tr|A0A5J1AXI3|A0A5J1AXI3_SALMS 2,3-dihydro-2,3-dihydroxybenzoate dehydrogenase; OS = Salmonella muenster OX=82689 GN=dhbA PE=4 SV=1

SEQ ID NO: 92102 - protein, 251 aa, unidentified
  source 1..251: note = Salmonella newport
  REGION 1..251: note = tr|A0A0H3BRP9|A0A0H3BRP9_SALNS 2,3-dihydro-2,3-dihydroxybenzoate dehydrogenase; OS = Salmonella newport (strain SL254) OX=423368 GN=entA; PE = 4 SV=1
MPCIDFSDKTVWVTGAGKGIGYATALAFVDAGARVIGFDREFTQENYPFATEVMDVADAGQVAQVCQRVLQKTPRLDVLVNAAGILRMGATDALSVDDWQQTFAVNVGGAFNLFSQTMAQFRRQQGGAIVTVASDAAHTPRIGMSAYGASKAALKSLALTVGLELAGCGVRCNVVSPGSTDTDMQRTLWVSEDAEQQRIRGFGEQFKLGIPLGKIARPQEIANTILFLASDLASHITLQDIVVDGGSTLGA

SEQ ID NO: 92103 - protein, 251 aa, unidentified
  source 1..251: note = Salmonella newport
  REGION 1..251: note = tr|A0A4P3G1I2|A0A4P3G1I2_SALNE 2,3-dihydro-2,3-dihydroxybenzoate dehydrogenase; OS = Salmonella newport OX=108619 GN=SX18_15320 PE=4 SV=1
MPCIDFSDKTVWVTGAGKGIGYATALAFVDAGARVIGFDREFTQENYPFATEVMDVADAGQVAQVCQRVLQKTPRLDVLVNAAGILRMGATDALSVDDWQQTFAVNVGGAFNLFSQTMAQFRRQQGGAIVTVASDAAHTPRIGMSAYGASKAALKSLALTVGLELAGCGVRCNVVSPGSTDTDMQRTLWVSEDAVQQRIRGFGEQFKLGIPLGKIARPQEIANTILFLASDLASHITLQDIVVDGGSTLGA

SEQ ID NO: 92104 - protein, 251 aa, unidentified
  source 1..251: note = Salmonella oranienberg
  REGION 1..251: note = tr|A0A3Z0YPG0|A0A3Z0YPG0_SALON 2,3-dihydro-2,3-dihydroxybenzoate dehydrogenase; OS = Salmonella oranienberg OX=28147 GN=ZU40_15845 PE=4 SV=1
MTGFDFSDKTVWVTGAGKGIGYATALAFVDAGARVIGFDREFTQENYPFATEVMDVADAAQVAQVCQRVLQKTPRLDVLVNAAGILRMGATDALSVDDWQQTFAVNVGGAFNLFSQTMAQFRRQQGGAIVTVASDAAHTPRIGMSAYGASKVALKSLALTVGLELAGCGVRCNVVSPGSTDTDMQRTLWVSEDAEQQRIRGFGEQFKLGIPLGKIARPQEIANTILFLASDLASHITLQDIVVDGGSTLGA

SEQ ID NO: 92105 - protein, 251 aa, unidentified; identical to SEQ ID NO: 92102
  source 1..251: note = Salmonella paratyphi
  REGION 1..251: note = tr|A0A5I8SCI3|A0A5I8SCI3_SALPT 2,3-dihydro-2,3-dihydroxybenzoate dehydrogenase; OS = Salmonella paratyphi A OX=54388 GN=dhbA PE=4 SV=1

SEQ ID NO: 92106 - protein, 251 aa, unidentified
  source 1..251: note = Salmonella paratyphi
  REGION 1..251: note = tr|A0A3Z1EI61|A0A3Z1EI61_SALPB 2,3-dihydro-2,3-dihydroxybenzoate dehydrogenase; OS = Salmonella paratyphi B (strain ATCC BAA-1250 / SPB7); OX = 1016998 GN=AU980_19930 PE=4SV=1
MPCIDFSDKTVWVTGAGKGIGYATALAFVDAGARVIGFDREFTQESYPFATEVMDVADAAQVAQVCQRVLQKTPRLDVLVNAAGILRMGATDALSVDDWQQTFAVNVGGAFNLFSQTMAQFRRQQGGAIVTVASDAAHTPRIGMSAYGASKAALKSLALTVGLELAGCGVRCNVVSPGSTDTDMQRTLWVSEDAEQQRIRGFGEQFKLGIPLGKIARPQEIANTILFLASDLASHITLQDIVVDGGSTLGA

SEQ ID NO: 92107 - protein, 251 aa, unidentified
  source 1..251: note = Salmonella potsdam
  REGION 1..251: note = tr|A0A5H7F775|A0A5H7F775_SALPO 2,3-dihydro-2,3-dihydroxybenzoate dehydrogenase; OS = Salmonella potsdam OX=597 GN=dhbA PE=4 SV=1
MPCIDFSDKTVWVTGAGKGIGYATALAFVDAGARVIGFDREFTQESYPFATEVMDVADAAQVAQVCQRVLQKTSRLDVLVNAAGILRMGATDALSVDDWQQTFAVNVGGAFNLFSQTMAQFRRQQGGAIVTVASDAAHTPRIGMSAYGASKAALKSLALTVGLELAGCGVRCNVVSPGSTDTDMQRTLWVSEDAEQQRIRGFGEQFKLGIPLGKIARPQEIANTILFLASDLASHITLQDIVVDGGSTLGA

SEQ ID NO: 92108 - protein, 251 aa, unidentified
  source 1..251: note = Salmonella rubislaw
  REGION 1..251: note = tr|A0A5I1KZB8|A0A5I1KZB8_SALRU 2,3-dihydro-2,3-dihydroxybenzoate dehydrogenase; OS = Salmonella rubislaw OX=598 GN=dhbA PE=4 SV=1
MPCIDFSDKTVWVTGAGKGIGYATALAFVDAGARVIGFDREFTQENYPFATEFMDVADAAQVAQVCQRVLQKTPRLDVLVNAAGILRMGATDALSVDDWQQTFAVNVGGAFNLFSQTMAQFRRQQGGAIVTVASDAAHTPRIGMSAYGASKAALKSLALTVGLELAGCGVRCNVVSPGSTDTDMQRTLWVSEDAEQQRIRGFGEQFKLGIPLGKIARPQEIANTILFLASDLASHITLQDIVVDGGSTLGA

SEQ ID NO: 92109 - protein, 251 aa, unidentified
  source 1..251: note = Salmonella schwarzengrund
  REGION 1..251: note = tr|A0A0N1QZA2|A0A0N1QZA2_SALSV 2,3-dihydro-2,3-dihydroxybenzoate dehydrogenase; OS = Salmonella schwarzengrund (strain CVM19633) OX=439843; GN = entA PE=4 SV=1
MASFDFSDKTVWVTGAGKGIGYATALAFVDAGARVFGFDREFTQENYPFATEVMDVADAAQVAQVCQRVLQKTPRLDVLVNAAGILRMGATDALSVDDWQQTFAVNVGGAFNLFSQTMTQFRRQQGGAIVTVASDAAHTPRIGMSAYGASKAALKSLALTVGLELAGCGVRCNVVSPGSTDTDMQRTLWVSEDAEQQRIRGFGEQFKLGIPLGKIARPQEIANTILFLASDLASHITLQDIVVDGGSTLGA

SEQ ID NO: 92110 - protein, 251 aa, unidentified
  source 1..251: note = Salmonella senftenberg
  REGION 1..251: note = tr|A0A3V2I4U7|A0A3V2I4U7_SALSE 2,3-dihydro-2,3-dihydroxybenzoate dehydrogenase; OS = Salmonella senftenberg OX=28150 GN=dhbA PE=4 SV=1
MPCIDFSDKTVWVTGAGKGIGYATALAFVDAGARVIGFDREFTQENYPFATEVMDVADAVQVAQVCQRVLQKTPRLDVLVNAAGILRMGATDALSVDDWQQTFAVNVGGAFNLFSQTMAQFRRQQGGAIVTVASDAAHTPRIGMSAYGASKAALKNLALTVGLELAGCGVRCNVVSPGSTDTDMQRTLWVSEDAEQQRIRGFGEQFKLGIPLGKIARPQEIANTILFLASDLASHITLQDIVVDGGSTLGA

SEQ ID NO: 92111 - protein, 150 aa, Salmonella sp.
  REGION 1..150: note = tr|A0A509CT92|A0A509CT92_9ENTR 2,3-dihydro-2,3-dihydroxybenzoate dehydrogenase; OS = Salmonella sp. NCTC 11881 OX=2583579 GN=entA_2 PE=4 SV=1
MTGFDFSDKTVWVTGAGKGIGYATALAFVDAGARVIGFDREFTQENYPFATEVMDVADAAQVAQVCQRVLQKTTRLDVLVNAAGILRMGATDALSVDDWQQTFAVNVGGAFNLFFSDDGAVSPSAGRGDCHRSLRCGAYAAHRYERLRRL

SEQ ID NO: 92112 - protein, 251 aa, Salmonella sp.; identical to SEQ ID NO: 92078
  REGION 1..251: note = tr|A0A509BYH2|A0A509BYH2_9ENTR 2,3-dihydro-2,3-dihydroxybenzoate dehydrogenase; OS = Salmonella sp. NCTC 3046 OX=2583580 GN=entA PE=4 SV=1

SEQ ID NO: 92113 - protein, 251 aa, Salmonella sp.; identical to SEQ ID NO: 92100
  REGION 1..251: note = tr|A0A509CH49|A0A509CH49_9ENTR 2,3-dihydro-2,3-dihydroxybenzoate dehydrogenase; OS = Salmonella sp. NCTC 6947 OX=2583581 GN=entA PE=4 SV=1

SEQ ID NO: 92114 - protein, 134 aa, Salmonella sp.
  REGION 1..134: note = tr|A0A509BHL5|A0A509BHL5_9ENTR 2,3-dihydro-2,3-dihydroxybenzoate dehydrogenase; OS = Salmonella sp. NCTC 7297 OX=2583578 GN=entA_1 PE=4 SV=1
MAQFRRQQGGVIVTVASDAAHTPRIGMSAYGASKAALKSLALTVGLELAGCGVRCNVVSPGSTDTDMQRALWVSEDAEQQRIRGFGEQFKLGIPLGKIARPQEIANTILFLASDLASHITLQDIVVDGGSTLGA

SEQ ID NO: 92115 - protein, 251 aa, unidentified
  source 1..251: note = Salmonella thompson
  REGION 1..251: note = tr|A0A3Y9ZSD5|A0A3Y9ZSD5_SALTH 2,3-dihydro-2,3-dihydroxybenzoate dehydrogenase; OS = Salmonella thompson OX=600 GN=DFV51_13475 PE=4 SV=1
MPCIDFSDKTVWVTGAGKGIGYATALAFVDAGARVIGFDREFTQENYPFATEVMDVADAAQVAQVCQRVLQKTPRLDVLVNAAGILRMGATDALSVDDWQQTFAVNVGGAFNLFSQTMVQFRRQQGGAIVTVASDAAHTPRIGMSAYGASKAALKSLALTVGLELAGCGVRCNVVSPGSTDTDMQRTLWVSEDAEQQRIRGFGEQFKLGIPLGKIARPQEIANTILFLASDLASHITLQDIVVDGGSTLGA

SEQ ID NO: 92116 - protein, 251 aa, unidentified
  source 1..251: note = Salmonella typhi
  REGION 1..251: note = tr|Q8Z8K9|Q8Z8K9_SALTI 2,3-dihydro-2,3-dihydroxybenzoate dehydrogenase; OS = Salmonella typhi OX=90370 GN=dhbA PE=4 SV=1
MASFDFSDKTVWVTGAGKGIGYATALAFVDAGARVIGFDREFTQENYPFATEVMDVADAAQVAQVCQRVLQKTPRLDVLVNAAGILRMGATDALNVDDWQQTFAVNVGGAFNLFSQTMAQFRRQQGGAIVTVASDAAHTPRIGMGAYGASKAALKSLALTVGLELAGCGVRCNVVSPGSTDTDMQRTLWVSEDAEQQRIRGFGEQFKLGIPLGKIARPQEIANTILFLASDLASHITLQDIVVDGGSTLGA

SEQ ID NO: 92117 - protein, 251 aa, unidentified; identical to SEQ ID NO: 92100
  source 1..251: note = Salmonella typhimurium
  REGION 1..251: note = tr|A0A3Z6P6W5|A0A3Z6P6W5_SALTU 2,3-dihydro-2,3-dihydroxybenzoate dehydrogenase; OS = Salmonella typhimurium (strain ATCC 68169 / UK-1); OX = 990282 GN=AU596_25025 PE=4 SV= 1

SEQ ID NO: 92118 - protein, 251 aa, unidentified; identical to SEQ ID NO: 92100
  source 1..251: note = Salmonella typhimurium
  REGION 1..251: note = tr|Q8ZR30|Q8ZR30_SALTY 2,3-dihydro-2,3-dihydroxybenzoate dehydrogenase; OS = Salmonella typhimurium (strain LT2 / SGSC1412 / ATCC 700720) OX=99287 GN=entA PE=4 SV=1

SEQ ID NO: 92119 - protein, 86 aa, unidentified
  source 1..86: note = Salmonella typhimurium
  REGION 1..86: note = tr|A0A484YLT4|A0A484YLT4_SALTM Putative oxidoreductase OS=Salmonella typhimurium OX=90371; GN = ucpA_1 PE=4 SV=1
MGKLTGKTALITGASQGIGEGIARVFARHGANLILLDISDEIEKLADELGGRGIAALPLRLTSEILLRCRRRLRAPKRLKVELIFW

SEQ ID NO: 92120 - protein, 251 aa, unidentified; identical to SEQ ID NO: 92102
  source 1..251: note = Salmonella virchow
  REGION 1..251: note = tr|A0A5H8R6H4|A0A5H8R6H4_SALVI 2,3-dihydro-2,3-dihydroxybenzoate dehydrogenase; OS = Salmonella virchow OX=48409 GN=dhbA PE=4 SV=1

SEQ ID NO: 92121 - protein, 248 aa, Serratia ficaria
  REGION 1..248: note = tr|A0A240C5U9|A0A240C5U9_SERFI 2,3-dihydro-2,3-dihydroxybenzoate dehydrogenase; OS = Serratia ficaria OX=61651 GN=entA PE=4 SV=1
MDFSGKRVWVTGAARGIGEQIARHFMAQGAEVLGFDREFAQPDLPYPCVTLDISQPQQVAEVCREQLAQNPRLDVLVNAAGILRMGNTEDLSLDDWHQCINVNASGAFYLFRALLPHFKAQRRGAIVSVGSNAAHVPRVQMAAYCASKAALTSLNHCVGLELAPFGVRCNLVSPGSTDTPMQRGMWQTPDAEQRTIAGFPEMFKLGIPLGKIARPDEIANAVLFLASDLASHITLQDIVIDGGATLAS

SEQ ID NO: 92122 - protein, 239 aa, Serratia fonticola
  REGION 1..239: note = tr|A0A448SYB4|A0A448SYB4_SERFO 2,3-dihydro-2,3-dihydroxybenzoate dehydrogenase; OS = Serratia fonticola OX=47917 GN=dhbA_2 PE=4 SV=1
MKNTILICGYGPGISHAVARRFGKAGHPVALIARNVQRLTEAVAELTAEGIQVQAFPADLSDVKAIRRAVTDVREAMGPIGILHWNVFLDIEGDLLSTPPEDLGKSFDLRVVGYITAVQESMDDLAASKGTVLVTSGVMALDDPQINAFAVDYAAIAISGAAQRKATHILAHTLAPHDIHVGEVIVNGFVEGTPGGSGKSNTVSPTDIAEQFWALHTARQVCSVIIGKAVPIAEAGIHG

SEQ ID NO: 92123 - protein, 252 aa, Serratia liquefaciens
  REGION 1..252: note = tr|A0A515CSB6|A0A515CSB6_SERLI 2,3-dihydro-2,3-dihydroxybenzoate dehydrogenase; OS = Serratia liquefaciens OX=614 GN=dhbA PE=4 SV=1
MSQQGDFAGKRVWVTGAGAGIGLETALAFVRAGAEVIGFDKHFGEPEYAFRTEVLDIADSDAVDALCGRLLAEQGELDVLVNGAGILRMGLADETSTADWLACLAVNAGGAFNMFRHALPVFRRQRRGAIVSVASNAAHVPRVGMAAYCASKAALRSLCQTVGLEMAPYGVRCNLVSPGSTNTPMQRGMWQDETGEQNTINGFPEQFKLGIPLGKIAQPQEIADAILFLASDRASHITMQDIVIDGGATLAA

SEQ ID NO: 92124 - protein, 252 aa, Serratia marcescens
  REGION 1..252: note = tr|A0A0A5TBX9|A0A0A5TBX9_SERMA 2,3-dihydro-2,3-dihydroxybenzoate dehydrogenase; OS = Serratia marcescens OX=615 GN=dhbA PE=4 SV=1
MSIQMDFTGKRVWVTGAARGIGEQIARHFLTQGAEVVGFDREFANPDLPYPCVTLDISRPEQVEAVCRQQLAENPRLDVLVNAAGILRMGNTEDLSVDDWHQCINVNASGAFYLFRAVLPHFKAQRSGAIVSIGSNAAHVPRAQMAAYCASKAALTSLNHCVGLEMAPFGVRCNLVSPGSTDTPMQRGMWQTDDAQQRTIAGFPEMFKLGIPLGKIARPDEIANAVLFLASDLASHITMQDIVIDGGATLAA

SEQ ID NO: 92125 - protein, 252 aa, Serratia marcescens
  REGION 1..252: note = tr|A0A1C0F8M3|A0A1C0F8M3_SERMA 2,3-dihydro-2,3-dihydroxybenzoate dehydrogenase; OS = Serratia marcescens subsp. marcescens OX=211759 GN=dhbA; PE = 4 SV=1
MSIQMDFTGKRVWVTGAARGIGEQIARHFLTQGAEVVGFDREFANPDLPYPCVMLDISRPEQVEAVCRQQLAENPRLDVLVNAAGILRMGNTEDLSVDDWHQCINVNASGAFYLFRAVLPHFKAQRSGAIVSIGSNAAHVPRAQMAAYCASKAALTSLNHCVGLEMAPFGVRCNLVSPGSTDTPMQRGMWQTDDAQQRTIAGFPEMFKLGIPLGKIARPDEIANAVLFLASDLASHITMQDIVIDGGATLAA

SEQ ID NO: 92126 - protein, 252 aa, Serratia marcescens
  REGION 1..252: note = tr|A0A5C7BBM1|A0A5C7BBM1_SERMA 2,3-dihydro-2,3-dihydroxybenzoate dehydrogenase; OS = Serratia marcescens subsp. sakuensis OX=211760 GN=dhbA; PE = 4 SV=1
MSIQMDFTGKRVWVTGAARGIGEQIARHFLTQGAEVVGFDREFANPDLPYPCVTLDISRPEQVEAVCRQQLAENPQLDVLVNAAGILRMGNTEDLSVDDWHQCINVNASGAFYLFRAVLPHFKAQRSGAIVSIGSNAAHVPRAQMAAYCASKAALTSLNHCVGLEMAPFGVRCNLVSPGSTDTPMQRGMWQTDDAQQRTIAGFPEMFKLGIPLGKIARPDEIANAVLFLASDLASHITMQDIVIDGGATLAA

SEQ ID NO: 92127 - protein, 252 aa, Serratia nematodiphila
  REGION 1..252: note = tr|A0A5C7CZN7|A0A5C7CZN7_9GAMM 2,3-dihydro-2,3-dihydroxybenzoate dehydrogenase; OS = Serratia nematodiphila OX=458197 GN=dhbA PE=4 SV=1
MSIQMDFTGKRVWVTGAARGIGEQIARHFLTQGAEVVGFDREFANPDLPYPCVTLDISRPEQVEAVCRQQLAENPRLDVLVNAAGILRMGNTEDLSVDDWHQCINVNASGAFYLFRAVLPHFKAQRSGAIVSIGSNAAHVPRAQMAAYCASKAALTSLNHCVGLEMAPFGVRCNLVSPGSTDTPMQRGMWQTDDAQQRTIAGFPELFKLGIPLGKIARPDEIANAVLFLASDLASHITMQDIVIDGGATLAA

SEQ ID NO: 92128 - protein, 251 aa, Serratia odorifera
  REGION 1..251: note = tr|D4E3D5|D4E3D5_SEROD 2,3-dihydroxybenzoate-2,3-dehydrogenase OS=Serratia odorifera DSM 4582 OX=667129 GN=entA PE=4 SV=1
MSGWDFNGKRVWVTGAGAGIGLQTALDFVAAGAEVVGFDLRFDLREYPFRCEVLDIADGEAVDGVCTRLLAEQGELDVLVNGAGILRMGLTDATSSADWMACLNVNAGGAFNMFRHALPVFRRQRRGAIVSIASNAAHVPRVGMAAYCASKAALRSLCQTVGLEMAEFGVRSNMVSPGSTNTPMQRGMWQDETGEQKTIQGFPQQFKLGIPLGKIAQPQEVSNAILFLASDLASHITMQDIVIDGGATLAA

SEQ ID NO: 92129 - protein, 191 aa, Serratia odorifera
  REGION 1..191: note = tr|A0A447KU61|A0A447KU61_SEROD 2,3-dihydro-2,3-dihydroxybenzoate dehydrogenase; OS = Serratia odorifera OX=618 GN=entA PE=3 SV=1
MSGWDFNGKRVWVTGAGAGIGLQTALDFVAAGAEVVGFDLRFDLREYPFRCEVLDIADGEAVDGVCTRLLAEQGELDVLVNGAGILRMGLTDATSSADWMACLNVNAGGAFNMFRHALPVFRRQRRGAIVSIASNAAHVPRVGMAAYCASKAALRSLCQTVGLEMAEFGVRSNMVSPGSTNTPMQRGMWQG

SEQ ID NO: 92130 - protein, 252 aa, Serratia plymuthica
  REGION 1..252: note = tr|A0A2X4UWH3|A0A2X4UWH3_SERPL 2,3-dihydro-2,3-dihydroxybenzoate dehydrogenase; OS = Serratia plymuthica OX=82996 GN=entA PE=4 SV=1
MGEEGDFAGKRVWVTGAGAGIGLETALAFVRAGAEVIGFDLRFDEPEYPFRTEVLDVADSDAVDSLCGRLLAAQPALDVLVNGAGILRMGLADETSTADWLACMAVNAGGAFNMFRHVLPVFRRQRRGAIVSVASNAAHVPRVGMAAYCASKAALRSLCQTVGLEMAPYGVRCNLVSPGSTNTPMQRGMWQDESGEQNTINGFPEQFKLGIPLGKIAQPQEIADAILFLASDRASHITMQDIVIDGGATLAA

SEQ ID NO: 92131 - protein, 252 aa, Serratia plymuthica
  REGION 1..252: note = tr|S4YJ85|S4YJ85_SERPL 2,3-dihydroxybenzoate-2,3-dehydrogenase OS=Serratia plymuthica S13 OX=1348660 GN=M621_18160 PE=4 SV=1
MGKEGDFAGKRVWVTGAGAGIGLETALAFVRAGAEVIGFDLRFDEPEYPFRTEVLDVADSDAVDSLCGRLLAAQPALDVLVNGAGILRMGLADETSTADWLACMAVNAGGAFNMFRHALPVFRRQRCGAIVSVASNAAHVPRVGMAAYCASKAALRSLCQTVGLEMAPYGVRCNLVSPGSTNTPMQRGMWQDESGEQNTIKGFPEQFKLGIPLGKIAQPQEIADAILFLASDRASHITLQDIVIDGGATLAA

SEQ ID NO: 92132 - protein, 252 aa, Serratia proteamaculans
  REGION 1..252: note = tr|A0A4Z0DUU6|A0A4Z0DUU6_9GAMM 2,3-dihydro-2,3-dihydroxybenzoate dehydrogenase; OS = Serratia proteamaculans OX=28151 GN=dhbA PE=4 SV=1
MEQRGDFAGKRVWVTGAGAGIGLATALAFVQAGAEVIGFDKHFGEPEYAFRTEVLDIADSDAVDRVCGRLLAEQGELDVLVNGAGILRMGLADETSTADWLACLAVNAGGAFNLFRHALPVFRRQRRGAIVSVASNAAHVPRVGMAAYCASKAALRSLCNTVGLEMAPYGVRCNLVSPGSTNTPMQRGMWQDETGEQNTINGFPEQFKLGIPLGKIAQPQEIADAILFLASDRASHITMQDIVIDGGATLAA

SEQ ID NO: 92133 - protein, 252 aa, Serratia quinivorans
  REGION 1..252: note = tr|A0A2X2GJA3|A0A2X2GJA3_9GAMM 2,3-dihydro-2,3-dihydroxybenzoate dehydrogenase; OS = Serratia quinivorans OX=137545 GN=entA PE=4 SV=1
MGQQGDFAGKRVWVTGAGAGIGLTTALAFVQAGAEVVGFDKHFGEQEYPFRTEVLDIADSDAVDRVCGRLLAEQGDLDVLVNGAGILRMGLTDETSTADWLSCLAVNAGGAFNMFRHALPVFRRQRRGAIVSVASNAAHVPRVGMAAYCASKAALRSLCQTVGLEMAPYGVRSNLVSPGSTNTPMQRGMWLDETGEQNTINGFPEQFKLGIPLGKIAQPQEIADAILFLASDRASHITMQDIVIDGGATLAA

SEQ ID NO: 92134 - protein, 251 aa, Serratia rubidaea
  REGION 1..251: note = tr|A0A3S4XI15|A0A3S4XI15_SERRU 2,3-dihydro-2,3-dihydroxybenzoate dehydrogenase; OS = Serratia rubidaea OX=61652 GN=entA PE=4 SV=1
MSSWDFSGKRVWVTGAGAGIGLQTARQFAAAGAEVIGFDLRFSEAEYPFHTEVLDIADAEAVERVCTRLLAQHGELDVLVNGAGILRMGLTDATSSADWMACLNVNAGGAFNMFRHTLPVFRRQRRGAIVSIASNAAHVPRVGMAAYCASKAALRSLCQTVGLEMAEFGVRSNMVSPGSTNTPMQRGMWQDETGEQKTINGFPEQFKLGIPLGKIAQPQEISDAILFLASDMASHITMQDIVIDGGATLAA

SEQ ID NO: 92135 - protein, 252 aa, Serratia sp.
  REGION 1..252: note = tr|A0A3G2FGJ2|A0A3G2FGJ2_9GAMM 2,3-dihydro-2,3-dihydroxybenzoate dehydrogenase; OS = Serratia sp. 3ACOL1 OX=2448483 GN=dhbA PE=4 SV=1
MGREQEFSGKRVWVTGAGAGIGYQTALAFAQSGAEVIGFDLHFGDLDYPFRTEVLDITDADAVDSVCQRLLAEHERLDVLVNGAGVLRMGLTDETSNADWLACMAVNAGGAFNLFRHTLPVFRRQKQGAIVSIASNAAHVPRVGMAAYCASKAAMRSLCQTVGLEMAPYGVRSNLVSPGSTNTPMLRGMWQDEHGESNMIKGFPDQFKLGIPLGKIAQPQEIADAILFLASDRASHITMQDIVIDGGATLAA

SEQ ID NO: 92136 - protein, 252 aa, Serratia sp.
  REGION 1..252: note = tr|A0A087KNT2|A0A087KNT2_9GAMM 2,3-dihydroxybenzoate-2,3-dehydrogenase OS=Serratia sp. Ag1 OX=1524467 GN=IV04_23045 PE=4 SV=1
MSNGHDFTGKRVWVTGAGAGVGYQTALAFVQDGAEVIGFDLRFDEQDYPFRTVVLDIADDEAVERVCLRLLAEQPELDVLVNGAGILRMGLADETSSADWLACMTVNAGGAFNMFRQTLPVFRRQRRGAIVSVASNAAHVPRVGMAVYGASKAALRSLCQTVGLEMAPYGVRCNLVSPGSTNTPMLRGMWQDESGERKTIAGYPEQFKLGIPLGKIAQPQEIADAILFLASDRASHITLQDIVIDGGATLAA

SEQ ID NO: 92137 - protein, 239 aa, Serratia sp.
  REGION 1..239: note = tr|A0A084A428|A0A084A428_9GAMM 2,3-dihydro-2,3-dihydroxybenzoate dehydrogenase; OS = Serratia sp. DD3 OX=1410619 GN=dhbA PE=4 SV=1
MKNTIVICGYGPGISQAVARRFGKAGHPVALIARNVQRLTEAVTELNAEGIQVQAFPADLSDVKAIRHVFTNVHGMMGPIGILHWNVFLDIEGDLLSTPPDDLSKSFDLRVVGYITAVQESKNDLMASKGTVLVTSGVMALDDPQINAFAVDYAAIAIGVAAQRKTTHILAHTFAPHGIHVGEVIVNGFVEGTPGAIGKSDTVAPTDVADQFWELHTTRQVHSVIVGKAVPIEEAGIHG

SEQ ID NO: 92138 - protein, 252 aa, Serratia sp.
  REGION 1..252: note = tr|A0A0Q4LUT9|A0A0Q4LUT9_9GAMM 2,3-dihydro-2,3-dihydroxybenzoate dehydrogenase; OS = Serratia sp. Leaf50 OX=1736223 GN=ASE93_17535 PE=4 SV=1
MDSTQEFSQKRVWVTGAAQGIGYTTALAFVKAGAEVVGFDKHFSDGDYPFRTELLDITDPKAVREVCQRLLSECDELDVLVNGAGILRMGATDELSDDDWHDCLAVNAGGAFNMFRYTLPVFRRQKRGAIVSIASNAAHVPRIGMSAYCASKAALRSLCLSVGLEMAPYGVRCNLVSPGSTDTPMQRGMWTNATGEQQTIAGFPEQFKLGIPLGKIGKPQDVADAVLFMASDRAGHITMQDIVIDGGATLSA

SEQ ID NO: 92139 - protein, 248 aa, Serratia sp.
  REGION 1..248: note = tr|I0QTG8|I0QTG8_9GAMM 2,3-dihydroxybenzoate-2,3-dehydrogenase OS=Serratia sp. M24T3 OX=932213 GN=SPM24T3_10526 PE=4 SV=1
MEFANKRVWVTGAGQGIGYTTALAFVKAGAEVIGFDRHFGSSHYPFRTEVLDITDVKAVREVCQRVLAENDRLDVLVNGAGILRMGVTDELSDDDWNDCLAVNAGGAFNMFRHTLPVFRRQQHGAIVSIASNAAHVPRIGMSAYCASKAALRSLCLSVGLEMAPFGVRCNLISPGSTDTPMQRGLWTSPESEQNTINGFPAQFKLGIPLGKMGKPQDVADAVLFMASDRAGHITMQDIVIDGGATLAA

SEQ ID NO: 92140 - protein, 252 aa, Serratia sp.
  REGION 1..252: note = tr|A0A5C7DHB7|A0A5C7DHB7_9GAMM 2,3-dihydro-2,3-dihydroxybenzoate dehydrogenase; OS = Serratia sp. S9 OX=2596922 GN=dhbA PE=4 SV=1
MSIQMDFTGKRVWVTGAARGIGEQIARHFLTQGAEVVGFDREFANPDLPYPCVTLDISRPEQVEAVCRQQLAENPRLDVLINAAGILRMGNTEDLSVDDWHQCINVNASGAFYLFRAVLPHFKAQRSGAIVSIGSNAAHVPRAQMAAYCASKAALTSLNHCVGLEMAPFGVRCNLVSPGSTDTPMQRGMWQTDDAQQRTIAGFPEMFKLGIPLGKIARPDEIANAVLFLASDLASHITMQDIVIDGGATLAA

SEQ ID NO: 92141 - protein, 249 aa, Serratia symbiotica
  REGION 1..249: note = tr|A0A068Z8M3|A0A068Z8M3_9GAMM 2,3-dihydro-2,3-dihydroxybenzoate dehydrogenase; OS = Serratia symbiotica OX=138074 GN=entA PE=4 SV=1
MMSFKNKVVWVTGAGRGIGQQIALRFAESGASVIGLDLAFERDDVPFRCIRLDVSSPEAVNKIGTELLEKDGLDILVNGAGILRLGTIEKLSWEDWQQSLNVNAGAVFNLFRIAVPHFQRQRGGSIVSVASNTAHVPRVNMAVYCASKAAMRSLCLSVGLELAPYGVRCNLVSPGSTLTPMLKGMLGEDPAAQQRLIDGLPSQFKLGIPLGKVAQPDEIADSVLFLASDAASHITLQDIVIDGGATLGA

SEQ ID NO: 92142 - protein, 252 aa, Serratia ureilytica
  REGION 1..252: note = tr|A0A5C7BVG6|A0A5C7BVG6_9GAMM 2,3-dihydro-2,3-dihydroxybenzoate dehydrogenase; OS = Serratia ureilytica OX=300181 GN=dhbA PE=4 SV=1
MSIQMDFTGKRVWVTGAARGIGEQIARHFLTQGAEVVGFDREFANPDLPYPCVTLDISRSEQVEAVCRQQLAENPRLDVLVNAAGILRMGNTEDLSVDDWHQCINVNASGAFYLFRAVLPHFKAQRSGAIVSIGSNAAHVPRAQMAAYCASKAALTSLNHCVGLEMAPFGVRCNLVSPGSTDTPMQRGMWQTDDAQQRTIAGFPEMFKLGIPLGKIARPDEIANAVLFLASDLASHITMQDIVIDGGATLAA

SEQ ID NO: 92143 - protein, 82 aa, Shigella boydii
  REGION 1..82: note = tr|E7T3P5|E7T3P5_9ENTR 2,3-dihydroxybenzoate-2,3-dehydrogenase OS=Shigella boydii ATCC 9905 OX=932676 GN=SGB_04404 PE=4 SV=1
MRCNVVSPGSTDTDMQRTLWVSDDAEEQRIRGFGEQFKLGIPLGKIARPQEIANTILFLASDLASHITLQDIVVDGGSTLGA

SEQ ID NO: 92144 - protein, 248 aa, Shigella boydii; identical to SEQ ID NO: 91748
  REGION 1..248: note = tr|A0A2S8DU55|A0A2S8DU55_SHIBO 2,3-dihydro-2,3-dihydroxybenzoate dehydrogenase; OS = Shigella boydii OX=621 GN=entA PE=4 SV=1

SEQ ID NO: 92145 - protein, 248 aa, Shigella boydii; identical to SEQ ID NO: 91748
  REGION 1..248: note = tr|B2TTF5|B2TTF5_SHIB3 2,3-dihydro-2,3-dihydroxybenzoate dehydrogenase; OS = Shigella boydii serotype 18 (strain CDC 3083-94 / BS512) OX=344609 GN=entA PE=4 SV=1

SEQ ID NO: 92146 - protein, 248 aa, Shigella dysenteriae
  REGION 1..248: note = tr|A0A3P6LH50|A0A3P6LH50_SHIDY 2,3-dihydroxybenzoate-2,3-dehydrogenase OS=Shigella dysenteriae OX=622 GN=entA PE=4 SV=1
MDFSGKNVWVTGAGKGIGYATALAFVEAGAKVTGFDQAFTQEQYPFATEVMDVADAAQVAQVCQQLLAETERLDALVNAAGILRMGATDQLSKEDWQQTFAVNVGGAFNLFQQTMNQFRRQRGGAIVTVASDAAHTPRIGMSAYGASKAALKSLALSVGLELAGSGVRCNVVSPGSTDTDMQRTLWVSDDAEEQRIRGFGEQFKLGIPLGKIARPQEIANTILFLASDLASHITLQDIVVDGGSTLGA

SEQ ID NO: 92147 - protein, 259 aa, Shigella dysenteriae
  REGION 1..259: note = tr|A0A090NY29|A0A090NY29_SHIDY 2,3-dihydro-2,3-dihydroxybenzoate dehydrogenase; OS = Shigella dysenteriae WRSd3 OX=1401327 GN=WRSd3_01387; PE = 4 SV=1
MVEATLPRGEIMDFSGKNVWVTGAGKGIGYATALAFVKAGAKVTGFDQAFTQEQYPFATEVMDVADAAQVAQVCQRLLAETERLDALVNAAGILRMGATDQLSKEDWQQTFAVNVGGAFNLFQQTMNQFRRQRGGAIVTVASDAAHTPRIGMSAYGASKAALKSLALSVGLELAGSGVRCNVVSPGSTDTDMQRTLWVSDDAEEQRIRGFGEQFKLGIPLGKIARPQEIANTILFLASDLASHITLQDIVVDGGSTLGA

SEQ ID NO: 92148 - protein, 248 aa, Shigella flexneri
  REGION 1..248: note = tr|A0A2Y2ZJ15|A0A2Y2ZJ15_SHIFL 2,3-dihydroxybenzoate-2,3-dehydrogenase OS=Shigella flexneri 2a OX=42897 GN=entA PE=4 SV=1
MDFSGKNVWVTGAGKGIGYATALTFVEAGAKVTGFDQAFTQEQYPFATEVMDVADAGQVAQVCQRLLAETERLDVLINAAGILRMGATDQLSKEDWQQTFAVNVGGAFNLFQQTMNQFRRQRGGAIVTVASDAAHTARIGMSAYGASKAALKSLALSVGLELAGSGVRCNVVSPGSTDTDMQRTLWVSDDAEEQRIRGFGEQFKLGIPLGKIARPQEIANTILFLASDLASHITLQDIVVDGGSTLGA

SEQ ID NO: 92149 - protein, 248 aa, Shigella flexneri; identical to SEQ ID NO: 91748
  REGION 1..248: note = tr|I6D465|I6D465_SHIFL 2,3-dihydro-2,3-dihydroxybenzoate dehydrogenase; OS = Shigella flexneri K-315 OX=766150 GN=entA PE=4 SV=1

SEQ ID NO: 92150 - protein, 248 aa, Shigella flexneri
  REGION 1..248: note = tr|A0A3U2IK89|A0A3U2IK89_SHIFL 2,3-dihydro-2,3-dihydroxybenzoate dehydrogenase; OS = Shigella flexneri OX=623 GN=DOU92_16315 PE=4 SV=1
MDFSGKNVWVTGAGKGIGYATALAFVEAGAKVTGFDQAFTQEQYPFATEVMDVADAGQVAQVCQRLLAETERLDVLINAAGILRMGATDQLSKEDWQQTFAVNVGGAFNLFQQTMNQFRRQRGGAIVTVASDAAHTARIGMSAYGASKAALKSLALSVGLELAGSGVRCNVVSLGSTDTDMQRTLWVSDDAEEQRIRGFGEQFKLGIPLGKIARPQEIANTILFLASDLASHITLQDIVVDGGSTLGA

SEQ ID NO: 92151 - protein, 248 aa, Shigella flexneri
  REGION 1..248: note = tr|A0A4P7TNZ4|A0A4P7TNZ4_SHIFM 2,3-dihydro-2,3-dihydroxybenzoate dehydrogenase; OS = Shigella flexneri serotype 5a (strain M90T) OX=1086030; GN = dhbA PE=4 SV=1
MDFSGKNVWVTGAGKGIGYATALAFVEAGAKVTGFDQAFTQEQYPFATEVMDVADAGQVAQVCQRLLAETERLDVLINAAGILRMGATDQLSKEDWQQTFAVNVGGAFNLFQQTMNQFRRQRGGAIVTVASDAAHTARIGMSAYGASKAALKSLALSVGLELAGSGVRCNVVSPGSTDTDMQRTLWVSDDAEEQRIRGFGEQFKLGIPLGKIARPQEIANTILFLASDLASHITLQDIVVDGGSTLGA

SEQ ID NO: 92152 - protein, 248 aa, Shigella flexneri; identical to SEQ ID NO: 92151
  REGION 1..248: note = tr|A0A5C2EBK9|A0A5C2EBK9_SHIFL 2,3-dihydro-2,3-dihydroxybenzoate dehydrogenase; OS = Shigella flexneri Y OX=424720 GN=dhbA PE=4 SV=1

SEQ ID NO: 92153 - protein, 248 aa, Shigella sonnei; identical to SEQ ID NO: 91741
  REGION 1..248: note = tr|A0A5F0C651|A0A5F0C651_SHISO 2,3-dihydro-2,3-dihydroxybenzoate dehydrogenase; OS = Shigella sonnei OX=624 GN=dhbA PE=4 SV=1

SEQ ID NO: 92154 - protein, 244 aa, Shimia marina
  REGION 1..244: note = tr|A0A0P1FI36|A0A0P1FI36_9RHOB 2,3-dihydro-2,3-dihydroxybenzoate dehydrogenase OS=Shimia marina OX=321267 GN=entA PE=3 SV=1
MSMKSILVTGASQGIGKATAEAFLQAGWRVGVLARSADKLAALAETYEHAIALEADVTDAAQMERAFDHFVAQSGRLDALFNNAGIFGPAGSIDDVDLSGFDQVLNVNVRGMFIAAQLAFAQMRRQDPQGGRIINNGSLAAHVPREGAVCYTLSKHAITGLTRSLSLDGRAFDIACGQIDIGNAATDMVSDLNARLVAEGKEPNPTMDVQDAAQSVLHMAALPLSANVQFMTVMATKMPFIGRG

SEQ ID NO: 92155 - protein, 255 aa, unidentified
  source 1..255: note = Snodgrassella alvi
  REGION 1..255: note = tr|X2HAH5|X2HAH5_9NEIS 2,3-dihydro-2,3-dihydroxybenzoate dehydrogenase [enterobactin] siderophore OS=Snodgrassella alvi wkB2; OX = 1196094 GN=SALWKB2_2023 PE=4 SV=1
MQQAIIVTGAAQGIGAAIVTKLLEQHYHVIGIDKQPYSPSWPVQQMIEAQYQTYWTSISQDITAFEETRILLNTLINQYNITGLVNVAGVLILTPLLSATEAQWQTSLNVNLLAPIFISQHLAAHFRQQRQGCIVTVSSNSARMARTEMGLYATTKAALSHFCRNLALEVAPYVRVNIVSPGSTLTAMQQQLWTDNEPPAGILDGDLTQYRLGIPLRKLAQPADIANTVSFLLSEEAAQITMQEIVVDGGATLGV

SEQ ID NO: 92156 - protein, 262 aa, unidentified
  source 1..262: note = Solibacillus isronensis
  REGION 1..262: note = tr|K1L3J6|K1L3J6_9BACL 2,3-dihydro-2,3-dihydroxybenzoate dehydrogenase; OS = Solibacillus isronensis B3W22 OX=1224748 GN=dhbA PE=3; SV = 1
MNFQELRGKVALVTGGAQGIGASLVKSLATLGVKVAVIDYNEEKLRSHVNGLIEQDHEVFAFPADVGDSNAIDAVVEKVENEIGPIEMLVNVAGALATGPVESCTDRDWARIFSINTTGVFYVSRAVSRYMVQRKAGSIVTVGSNAASVPRIFMAAYAASKAATVMFTKCLGLELAEHNIRCNIVSPGSTDTDMQRSMWSDDHGAEVMIKGMTETYKVGIPLKKIAQPDNIVDAILFFLSNQSSHITMSNLVVDGGATLGAN

SEQ ID NO: 92157 - protein, 258 aa, Sorangium cellulosum
  REGION 1..258: note = tr|A9EPQ8|A9EPQ8_SORC5 2,3-dihydro-2,3-dihydroxybenzoate dehydrogenase; OS = Sorangium cellulosum (strain So ce56) OX=448385 GN=mxcC; PE = 3 SV=1
MEFEHKAALVTGAAQGIGEAVARRLAARGAAVAAVDANRERLAAVVADLQASGHRAAAFAVDVADGEAVDGAVERIERELGPLEMLVNVAGVLRVGGALSLTSDDWERTFAVNTRGVFNVSRAVARRMVPRRSGSIVTVGSNAARTPRMNMGAYAASKAAAAQWTKCLGLELAQHDIRCNVVSPGSTDTPMQRALWADDRGAQAVIAGAPEAFRLGIPLRRIATTDDVASAVLFLLSDEARHITMHDLCVDGGATLGA

SEQ ID NO: 92158 - protein, 258 aa, Sorangium cellulosum
  REGION 1..258: note = tr|A0A2L0EVA4|A0A2L0EVA4_SORCE 2,3-dihydroxybenzoate-2,3-dehydrogenase OS=Sorangium cellulosum OX=56 GN=entA PE=4 SV=1
MEFKHKVALVTGAAQGIGEAVARALAARGAAVAGVDANRERLGAVVADLAASGLRAAAFPVDVSDTEAVNGVVDRVERELGPLDILVNVAGVLRVGPVLELSDEDWERTFAVNTRGVFNMSRAVARRMTARASGAIVTVGSNAARTPRVHMAAYAASKAATTMFTKCLGLELAQHNIRCNVVSPGSTDTPMQRSLWTGGRGARAVIAGSPEAFRVGIPLNRIADAEDVAAAVLFLASDQARHITMHDLCVDGGATLGV

SEQ ID NO: 92159 - protein, 250 aa, Sphaerisporangium sp.
  REGION 1..250: note = tr|A0A366LRC3|A0A366LRC3_9ACTN 2,3-dihydro-2,3-dihydroxybenzoate dehydrogenase; OS = Sphaerisporangium sp. LHW63015 OX=2248750; GN = DP939_32745 PE=4 SV=1
MKGVEGRIALVSGAAGGIGAAVCAALAGAGAKVAAADTQASAQPGVASYLLDVRDARAVEAAVAAIERDLGPIEILVNVAGVLRAASVRETDDETWRQSFAVNADGVFNLSRAVTRHMAVRRSGVVVTVGSNAASVPRIGMAAYAASKAAAVMFTRCLGLELAGYGVRCNVVSPGSTDTPMLRGLPGGDAPGAFEAVLAGEPAAFRVGVPLGRVALPEDVAEAVLFLASDHARHITMHELMVDGGASLRA

SEQ ID NO: 92160 - protein, 268 aa, Sphingobium sp.
  REGION 1..268: note = tr|A0A173KZJ0|A0A173KZJ0_9SPHN 2,3-dihydro-2,3-dihydroxybenzoate dehydrogenase; OS = Sphingobium sp. EP60837 OX=1855519 GN=entA PE=4 SV=1
MTVSLLGLEGKKALIVGGGRGMGEASALLLAEAGCDIAVLDSVLERAEQVAKEVRALGRAGIAIEADILDEASVKQAVADAEAAMGGLDILVTIVGQALFKPLLDVTLEEWDYDQSRNLRYFFVTGRAVAQSMIARGVPGSLICIGSVDGAVGSPMHAPYGAAKAGLMHLVKSMAAEWGRQGIRANAVAPGSITTPRLPETPDSRALMESSVLPIGRPGTTRDVAGAVLFLASGLSEYVTGHTLFVDGGWMAANHFDPRVMATKKSNE

SEQ ID NO: 92161 - protein, 329 aa, Sphingomonas dokdonensis
  REGION 1..329: note = tr|A0A245ZI51|A0A245ZI51_9SPHN 2,3-dihydro-2,3-dihydroxybenzoate dehydrogenase; OS = Sphingomonas dokdonensis OX=344880 GN=dhbA PE=3 SV=1
MGKVVVVTGAGAGVGRATAEKFASEGYDVALLSRDPERLERAAAELRRHGVRALPIPTDVADAAAVEAAADRTERELGPIDVWVNVAMATVFAPVAKLTPEEVERGTRVTYLGQVHGMMSALKRMRSRSGTIVNVGSALAYRSVPLQSVYCGAKAAIRGFTDSLRSEIIHDKIDVHLTMVDLPAVNTPQFDWALNKMGKKARPVAPIFEPEVPALAIYFAATHKRRDVWLGFSSVKAILGNRVAPGLIDRYLAKAGYSGQLTDEPTPANAPSNLFEAVPGDYDAHGRFDDSSRRRSIEFFTDRHRTGFLAAAAVAVGYLTHRAAKRLNV

SEQ ID NO: 92162 - protein, 257 aa, Staphylococcus carnosus
  REGION 1..257: note = tr|A0A380F7T3|A0A380F7T3_STACA Putative short chain dehydrogenase OS=Staphylococcus carnosus subsp. utilis; OX = 147449 GN=entA PE=4 SV=1
MHLMKNLIGKHFVITGGTSGLGYAITNAVLKKGAYVTLLVRNIDKFNKTYYPYNAHLLNAQVCNLNSRAAIKKLCFKKEAIDGLIHSAGLGYFKSIDAHEENEMIETYEINLINFNILLKQLAPYFTKHPYIVGISSLAAFSTQVHSGHYAASKAALNQVLNTYRLEHPNYQVMLVNTGPIRTPFHAKADPTLKYAAQVDNIMLDPDKLAEEIINNMLKNKSEVNRPKWLHALLKLYQLAPRTIEKTFPALFNNKKE

SEQ ID NO: 92163 - protein, 254 aa, Staphylococcus condimenti
  REGION 1..254: note = tr|A0A143P8C6|A0A143P8C6_9STAP Putative short chain dehydrogenase OS=Staphylococcus condimenti OX=70255; GN = entA PE=4 SV=1
MKNLIGKHFVITGGTSGLGYAITNAVLKRGAKVTLLVRNIDKFNKIYYPYNAHLLNVQLCNLNSRSDIKKITFQKDSIDGLIHSAGLGYFKSIDTHEEKEMIETYEINLINFNVLLKHLASYFRKHPYIVGISSLAAFSTQVYSGHYAASKAGLNQVLNTYRLEHPHYHVMLVNAGPIRTPFHAKADPTLKYAVQVDNIMLDPDKLAEDIIDSMLKNKFEINRPKWLYTLLKFYQLAPRKIEKTFPSLFNNKKE

SEQ ID NO: 92164 - protein, 254 aa, Staphylococcus piscifermentans
  REGION 1..254: note = tr|A0A239U2K7|A0A239U2K7_9STAP Putative short chain dehydrogenase OS=Staphylococcus piscifermentans OX=70258; GN = entA PE=4 SV=1
MENLIGKHFVITGGTSGLGYALTKVLLERGAKVTLLVRSMTKFKQTFFPHNTHLLQAVQCDLNSAEQIKRLDFAHATINGLIHSAGLGYFKSISAHSEEEMLETYRINVVHFNILLNHLAHSFSEHPYIIGISSLAAHSTQAHSGHYAASKAAFNQVLNTYRLEHPNYHILTVNAGPIRTPFHAKADPTLKYATQVDKLMLDPDKLANQIIIYMLRNKAELNAPKWLNSLLKLYQLAPRKLERAFPKLFNNKKE

SEQ ID NO: 92165 - protein, 258 aa, Starkeya sp.
  REGION 1..258: note = tr|A0A556PHB3|A0A556PHB3_9RHIZ 2,3-dihydro-2,3-dihydroxybenzoate dehydrogenase; OS = Starkeya sp. 3C OX=2597768 GN=FO470_00250 PE=4 SV=1
MRDSGLSGKVALVTGAAGGIGAAVVRQLHAEGVRVVAGDVAEAGVSALAAELGDAVVPALLDVRSTEAVDALVGHVEREVGPIDLLANVAGVLSYEPVVGLSDAEWERVFDINAAGVFRVSRAVARAMQARKRGAMVTVSSNAAGIPRHAMSAYAASKAAATMFTRCLGLELAPLGIRCNIVAPGSTLTPMQTGMWADGNGAARVIAGSPETFKAGIPLAKLATPDDIADAVVFLLSDRAGHVTMADLYIDGGATLRG

SEQ ID NO: 92166 - protein, 252 aa, Stenotrophomonas maltophilia
  REGION 1..252: note = tr|B2FHQ1|B2FHQ1_STRMK Putative enterobactin synthetase component A (2,3-dihydro-2,3-dihydroxybenzoate dehydrogenase) OS=Stenotrophomonas maltophilia (strain K279a)OX=522373 GN=entA PE=4 SV=1
MQLTGFEGRVALVTGAAGGIGEALVRLLAEAGCTVVATDREAPHVADTRVRSFALDVTDSAAVGALVDRVESSIGPIMLAASVAGVLHMGGVTETGDDDWRRVFAVNTDGVFHVGRALARVMSPRQRGVIVTVSSNAAGVPRHGMAAYAASKAAATMFTRCLGLELAPLGIRCNIVAPGSTLTPMQTGMWQDERGAERVIAGSLETYKAGIPLRKLATPEDIAHSVMFLLSEQAGHVAMSDLYVDGGATLRG

SEQ ID NO: 92167 - protein, 252 aa, Stenotrophomonas maltophilia
  REGION 1..252: note = tr|A0A431UN78|A0A431UN78_STEMA 2,3-dihydro-2,3-dihydroxybenzoate dehydrogenase; OS = Stenotrophomonas maltophilia OX=40324 GN=EKL94_03195; PE = 4 SV=1
MQLTGFERRVALVTGASGGIGEALVRLLAEAGCTVVATDREVPRVSDTRVTSFALDVTDSAAVDALVDQVESSIGPIALAASVAGVLHVGGVTETGDDDWRRVFAVNADGVFHVGRALARVMSPRRQGAIVTVSSNAAGVPRHGMAAYAASKAAATMFTRCLGLELAPLGIRCNIVAPGSTLTPMQTGMWQDERGAERVIAGNLETYKAGIPLRKLATPEDIAHSVMFLLSEQAGHVAMSDLYVDGGATLRA

SEQ ID NO: 92168 - protein, 252 aa, Stenotrophomonas maltophilia
  REGION 1..252: note = tr|M5CZ24|M5CZ24_STEMA 2,3-dihydroxybenzoate-2,3-dehydrogenase; OS = Stenotrophomonas maltophilia RA8 OX=1118157 GN=entA; PE = 4 SV=1
MQLTGFEGRVALVTGAAGGIGEALVRLLAEAGCTVVATDREAPVVADARVQAFALDVTDSAAVDALVDRVEASIGPIGLAASVAGVLQVGAVTETTDADWRRVFAVNADGVFHIGRALARVMSPRRQGAMVTVSSNAAGVPRHGMAAYAASKAAATMFTRCLGLELAPLGIRCNIVAPGSTLTPMQTGMWQDEHGAERVIAGNLETYKAGIPMRKLATPEDIAHSVMFLLSEQAGHVAMSDLYVDGGATLRG

SEQ ID NO: 92169 - protein, 252 aa, Stenotrophomonas maltophilia
  REGION 1..252: note = tr|M5CNK7|M5CNK7_STEMA 2,3-dihydro-2,3-dihydroxybenzoate dehydrogenase; OS = Stenotrophomonas maltophilia SKK35 OX=1118156 GN=entA; PE = 4 SV=1
MQLTGFEGRVALVTGAAGGIGEALVRLLAEAGCTVVATDREAPRVEDARVHAFSLDVTDSVAVDALLDRVEASLGPICLAASVAGVLHVGDVAGTSDADWRRVFSVNADGVFHVGRALARVMSPRRQGAIVTVSSNAAGVPRHGMAAYAASKAAATMFTRCLGLELAPLGIRCNIVAPGSTLTPMQTGMWQDEFGAQRVIAGSLETYKAGIPLRKLATPEDIAHAVMFLLSEQAGHVAMSDLYVDGGATLRG

SEQ ID NO: 92170 - protein, 253 aa, Stenotrophomonas sp.
  REGION 1..253: note = tr|A0A427BVR7|A0A427BVR7_9GAMM 2,3-dihydro-2,3-dihydroxybenzoate dehydrogenase; OS = Stenotrophomonas sp. 278 OX=2479851 GN=EGJ34_21780 PE=4; SV = 1
MKLTGFDGTVALVTGAAGGIGAALVQLLLDSGAVVVATDREAPVRAAHPRLHAYALDVSDAAAVDARVSAVESDLGPIGFGVNVAGVLQVGEVTGISDAQWRSVFAVNTDGVFHLGRALARVMTPRRRGAIVTVSSNAAGVPRHGMAAYAASKAAATMFTRCLGLELAPHGIRCNIVAPGSTLTPMQTGMWADDQGAQRVIAGTPETFKAGIPLGKLANPEDVAQAVMFLLSDQAGHIAMSDLYVDGGATLRG

SEQ ID NO: 92171 - protein, 252 aa, Stenotrophomonas sp.
  REGION 1..252: note = tr|A0A4P6VZK4|A0A4P6VZK4_9GAMM 2,3-dihydro-2,3-dihydroxybenzoate dehydrogenase; OS = Stenotrophomonas sp. ASS1 OX=2282124 GN=MG068_11915; PE = 4 SV=1
MQLTGFEGRVALVTGAAGGIGEALVRLLAEAGCTVVATDREAPVVVDARVQAFALDVTDSAAVDALVDRVEASIGPIGLAASVAGVLHVGAVAETTDADWRRVFAVNADGVFHVGRALARVMSPRGQGAIVTVSSNAAGVPRHGMAAYAASKAAATMFTRCLGLELAPLGIRCNIVAPGSTLTPMQTGMWQDAHGAERVIAGSLETYKAGIPLRKLATPEDIAHSVMFLLSEQAGHVAMSDLYVDGGATLRG

SEQ ID NO: 92172 - protein, 252 aa, Stenotrophomonas sp.
  REGION 1..252: note = tr|A0A4Q1CWM5|A0A4Q1CWM5_9GAMM 2,3-dihydro-2,3-dihydroxybenzoate dehydrogenase; OS = Stenotrophomonas sp. MA5 OX=2508572 GN=ERT44_04010 PE=4; SV = 1
MQLTGFEGRVALVTGAAGGIGTALVKLLVAAGCQVVATDRESPAIVGERVHACALDVSDSAAVDALIDQVEAKIGPIALAASVAGVLQVGAVTDTCDADWRRVFSVNADGVFHLGRALARVMSPRRQGAIVTVSSNAAGVPRHGMAAYAASKAAATMFTRCLGLELAPLGIRCNIVAPGSTLTAMQTGMWEDAYGAERVIAGNLDTYKAGIPLRKLATPEDVAQSVMFLLSEQAGHVAMSDLYVDGGATLRG

SEQ ID NO: 92173 - protein, 252 aa, Stenotrophomonas sp.
  REGION 1..252: note = tr|B8L5N8|B8L5N8_9GAMM Vibriobactin-specific 2,3-dihydro-2,3-dihydroxybenzoate dehydrogenase; OS = Stenotrophomonas sp. SKA14 OX=391601 GN=SSKA14_2204; PE = 4 SV=1
MQLTGFEGRVALVTGAAGGIGEALVRLLAEAGCTVVATDREAPRVEEARVHAFSLDVTDSVAVDALVDRVEASLGPIGLAASVAGVLHVGEVVGTTDADWRRVFAVNADGVFHVGRALARVMSPRRQGAIVTVSSNAAGVPRHGMAAYAASKAAATMFTRCLGLELAPLGIRCNIVAPGSTLTPMQTGMWQDEHGAERVIAGSPETYKAGIPLRKLATPDDIAHAVMFLLSEQAGHVAMSDLYVDGGATLRG

SEQ ID NO: 92174 - protein, 257 aa, Stigmatella aurantiaca
  REGION 1..257: note = tr|E3FDX3|E3FDX3_STIAD 2,3-dihydro-2,3-dihydroxybenzoate dehydrogenase; OS = Stigmatella aurantiaca (strain DW4/3-1) OX=378806; GN = STAUR_3598 PE=3 SV=1
MGTTSKVALVTGAAQGIGAAVVRALAGSGPVAALDTQAEKLSALATDLGQGRGRVVPYRADVRDSAAVEAVVEQVERELGPIGILVNVAGVLRTGAAVEFSDADWETTFAVNTQGVFHVSRAVARRMVPRKAGVIVTVASNASGTPRMQMAAYAASKAASAMFTKCLGLELAPHNIRCNVVSPGSTDTPMQRALWTDERGGDAAITGSLETFRVGIPLRRLATPADIADAVVFLTSDQARHITMHDLCVDGGATLGV

SEQ ID NO: 92175 - protein, 260 aa, unidentified
  source 1..260: note = Streptacidiphilus pinicola
  REGION 1..260: note = tr|A0A2X0J6H0|A0A2X0J6H0_9ACTN 2,3-dihydro-2,3-dihydroxybenzoate dehydrogenase; OS = Streptacidiphilus pinicola OX=2219663 GN=DN069_24415; PE = 3 SV=1
MENKVALVTGAAGGIGEAVVRALAGLGVAVALVDRNRERLEVLAKDLRRDGRRAEPLPADVTDSAEVEAAVSEAERRLGGLDYLVNAAGVLRTGEARELSDSDWSATFAVNTTGVFFVSRAVVNRMVARGSGGVIVTVASNAAGTARMEMSAYAASKAAATMFTKCLGLEVARFGIRCNVVAPGSTDTPMLTALWEDGGDDDALRASIDGVASAYRVGIPLGRIARPEHIADAVLFLLSEQAAHITMHDLTVDGGAALGH

SEQ ID NO: 92176 - protein, 256 aa, Streptacidiphilus sp.
  REGION 1..256: note = tr|A0A345SXP6|A0A345SXP6_9ACTN 2,3-dihydro-2,3-dihydroxybenzoate dehydrogenase; OS = Streptacidiphilus sp. DSM 106435 OX=2126346; GN = C7M71_014745 PE=3 SV=1
MENKVALVTGAAGGIGAAVVRALGERGVLVAAVDRDADRLAEVVGKLVADGIRAEAVPADVTDSDSVEAAVEAAEQRLGPLDYLVNAAGVLRLGEVRDFTDEDWRATFAVNVDGVFHVSRAVVNRMVTRGGGAIVTVASNAAVTPRTDMAAYAASKAAATLFTKSLGLEVARYGIRCNLVAPGSTDTRMLSSMWQDDSGRRGTIEGRPSAYRVGIPLGKLAEPSDIANAVVFLLSEEAGHITLHDLTVDGGAGLGA

SEQ ID NO: 92177 - protein, 248 aa, Streptococcus pneumoniae
  REGION 1..248: note = tr|A0A4V6JYD3|A0A4V6JYD3_STREE 3-ketoacyl-(Acyl-carrier-protein) reductase; OS = Streptococcus pneumoniae OX=1313 GN=fabG_1 PE=4 SV=1
MDFSGKNVWVTGAGKGIGYATALAFVEAGAKVTGFDQAFTQEQYPFATEVMDVADAGQVAQVCQRLLAETERLDVLINAAGIFRMGATDQLSKEDWQQTFAVNVGGAFNLFQQTMNQFRRQRGGAIVTVASDAAHTPRIGMSAYGASKAALKSLALSVGLELAGSGVRCNVVSPGSTDTDMQRTLWVSDDAEEQRIRGFGEQFKLGIPLGKIARPQEIANTILFLASDLASHITLQDIVVDGGSTLGA

SEQ ID NO: 92178 - protein, 254 aa, Streptococcus sanguinis
  REGION 1..254: note = tr|A0A427ZP61|A0A427ZP61_STRSA 2,3-dihydro-2,3-dihydroxybenzoate dehydrogenase; OS = Streptococcus sanguinis OX=1305 GN=entA PE=4 SV=1
MEKIISKAVILGASGGIGRQLAIELAQRTDQLVLVGRDEAKLTQLQEDLSGVQAKLSCRVLDLLDAAAVDDFAQQLDADLLINCCGLANFGPALSLSEADEKALWRVNYQAPIRLIKQVAERNRKIRLVQLSSLAALCPHPYLAAYSASKAALQTYCLALQEELRLKGSEVTVCCYILGPVQTAIFPPELQDALGGSQLQMSPEIAARRIIRLLQQGCSYAIVGKRYRLLAWLMKLLPQRWIIRLIGAYLRKGL

SEQ ID NO: 92179 - protein, 261 aa, Streptomonospora sp.
  REGION 1..261: note = tr|A0A4P6Q1Z4|A0A4P6Q1Z4_9ACTN 2,3-dihydro-2,3-dihydroxybenzoate dehydrogenase; OS = Streptomonospora sp. M2 OX=2498135 GN=dhbA PE=4 SV=1
MSQNGIAGTVALVTGAARGIGRAVALRLAAEGALVAAADLDAGGLAEVADELHGDGHKAAWYTLDVRDSADVARVVAAAERDLGPLTHAVNVAGVLATADVAETTDADWEHVFAVNATGVFHVSRAAARRMAQRGRGTITTVGSNAAGVPRAGMAAYGASKAAATMFTKSLGLELAGSGIRCNVVSPGSTDTPMQRGMWTGDQGAADVVAGSPERFRAGIPLGRIADPGDIADAVCFLASSSARHITMHDLYVDGGATLRA

SEQ ID NO: 92180 - protein, 259 aa, Streptomyces acidiscabies
  REGION 1..259: note = tr|A0A1Q2ZM60|A0A1Q2ZM60_9ACTN 2,3-dihydro-2,3-dihydroxybenzoate dehydrogenase; OS = Streptomyces acidiscabies OX=42234 GN=dhbA PE=4 SV=1
MDGMANRTALVTGAAGGIGTAIVHALASAGARVAAVDRDVRELLEVTTKLSTGGLDIAPLPADITDEDAVRRVVDETEQRLGGIDFLVNAAGILRLGTVRGFRTQDWADTFAVNATGVFHMTRAVVDRMIPRRSGAIVTVASNAARTPRSEMAAYAASKAAAAQFTKSLGVEVARYGIRCNVVAPGSTDTPMLSSMWADESGRQKTIDGSPDAFKLGIPLGKIARPEDVAAAVCFLLSDEASHITLHDLTVDGGATLGA

SEQ ID NO: 92181 - protein, 276 aa, Streptomyces alboniger
  REGION 1..276: note = tr|A0A5J6HED4|A0A5J6HED4_STRAD 2,3-dihydro-2,3-dihydroxybenzoate dehydrogenase; OS = Streptomyces alboniger OX=132473 GN=CP975_14845 PE=4; SV = 1
MPDHIPPDHLADESRAEGEFAGRTALVTGAGQGIGAAVATALAARGAHVVATDRSAHGIDELAAAARDLAGTVTPRVMDVTDPVAVTAVVDDVVRDHGALDLLVNVAGILRAAPVAELTDADWADTFAVNTTGVFHTSRAAASHMTARGRGCIVTVASNAAGIPRTGMAAYAASKAAATMFTKCLGLEVARSGVRCNVVAPGSTDTAMQRALWPDGQTEVPLSVIDGDPATYRTGIPLGRIAAPRDIADAVLFLASDRARHVTLQELYVDGGATLR

SEQ ID NO: 92182 - protein, 256 aa, Streptomyces albus
  REGION 1..256: note = tr|A0A4Z0VK61|A0A4Z0VK61_9ACTN 2,3-dihydro-2,3-dihydroxybenzoate dehydrogenase; OS = Streptomyces albus OX=1888 GN=D8771_34980 PE=4 SV=1
MEDKVALVTGAAGGIGAAVARALARRGARVAAVDLHTGRLTEEVGKLTADGLAVEAFPADVTRAAAVEELVEGVETRLGPVDLLVNAAGVLRLGPVHRLGDEDWAATFAVNTTGVFLVSRAVAGRMMPRSRGAIVTVASNAAGTPRTEMAAYAASKAAATMFTKCLALEVAGHGIRCNVVAPGSTDTAMLRSMWQDESGARATIEGRPEAYKLGIPLGKLARPADIADAVVFLLSDRAGHITMHELTVDGGATLGA

SEQ ID NO: 92183 - protein, 219 aa, unidentified
  source 1..219: note = Streptomyces alfalfae
  REGION 1..219: note = tr|A0A4Q7EUX3|A0A4Q7EUX3_9ACTN 2,3-dihydro-2,3-dihydroxybenzoate dehydrogenase; OS = Streptomyces alfalfae OX=1642299 GN=D4104_19205 PE=4; SV = 1
MAAHEPGRAAPAPGTITPRTMDVTDPAAVSRVIDETVRDLGALDILVNVAGILRTAPVAELTDADWADTFAVNTTGVFHASRAAASHMTARGSGCIVTVASNAAGIPRTGMAAYAASKAAATMFTKCLGLETARSGVRCNVVAPGSTDTAMQRALWPDGQAEAPSSVIAGDPATYRTGIPLGRIAAPEDIAEAVVFLASDRARHITLQELYVDGGATLR

SEQ ID NO: 92184 - protein, 265 aa, Streptomyces chartreusis
  REGION 1..265: note = tr|A0A2N9BJK3|A0A2N9BJK3_STRCX 2,3-dihydro-2,3-dihydroxybenzoate dehydrogenase; OS = Streptomyces chartreusis NRRL 3882 OX=1079985 GN=dhbA; PE = 3 SV=1
MTRTTDSRAMEGKVALVTGAAGGIGAAVVRAIAERGGVLAAVDANSVALKETTEALAGEGLRVEGFVADVTRPDEVEATVAAVEARLGPVDHLVNAAGILRLGDARTLSDTDWADTIAVNATGVFHMSRAVVNRMVPRRSGALVTVASNAAGTPRTQMAAYAASKAAATMFTKCLGLEVAEYGIRCNLVAPGSTDTPMLSSMWHDDSGREATVRGSLETFKVGIPLRKLAAPRDVADAVVFLLSEEASHITLHALTVDGGATLGV

SEQ ID NO: 92185 - protein, 271 aa, Streptomyces cinereoruber
  REGION 1..271: note = tr|A0A5J6IKL4|A0A5J6IKL4_9ACTN 2,3-dihydro-2,3-dihydroxybenzoate dehydrogenase; OS = Streptomyces cinereoruber OX=67260 GN=CP977_04045 PE=4; SV = 1
MPNGTGPNGEFAGRVALVTGAAQGIGEAVVRALSARGAAVAATDLSERELGQSVARLAEEAGADPAAGPVVPYRLDVTAPDDVAETVERVSRELGPVDILVNVAGMLRTGPAVETTDRDWADVFAVNTTGVFHLSRAVVAGMAARGSGSVVTVASNAAGIPRADMSVYAASKAAAVAFTKCLGLEVAARGVRCNAVCPGSTDTPMQRSLWDGDSVPDSVLDGDLATHRTGIPLRRIARPEDVAEAVVFLASDRARHITMQDLYVDGGATLR

SEQ ID NO: 92186 - protein, 263 aa, unidentified
  source 1..263: note = Streptomyces formicae
  REGION 1..263: note = tr|A0A291QA94|A0A291QA94_9ACTN 2,3-dihydro-2,3-dihydroxybenzoate dehydrogenase of siderophore biosynthesis OS=Streptomyces formicae; OX = 1616117 GN=KY5_3428 PE=4 SV=1
MPEHIPQEPGEFTGRTALVTGAGQGIGAAVATALAARGAHVVATDRDAHGIDELAAAHRGAITPRVMDVTNPLAVTAVVDDVVREHGSLDLLVNVAGILRAAPVAELTDADWADTFAVNTTGVFHTSRAAAAHMTARGSGCIVTVASNAAGIPRTGMAAYAASKAAATMFTKCLGLEIARTGVRCNVVAPGSTDTAMQRSLWTDDEAPQRVIAGDPETYRTGIPLGRIADPQDIAEAVVFLASDRARHITLQELYVDGGATLR

SEQ ID NO: 92187 - protein, 219 aa, Streptomyces fradiae; identical to SEQ ID NO: 92183
  REGION 1..219: note = tr|A0A3B7R078|A0A3B7R078_STRFR 2,3-dihydro-2,3-dihydroxybenzoate dehydrogenase; OS = Streptomyces fradiae OX=1906 GN=D3X13_02285 PE=4 SV=1

SEQ ID NO: 92188 - protein, 256 aa, Streptomyces fulvissimus
  REGION 1..256: note = tr|N0CVL2|N0CVL2_9ACTN 2,3-dihydro-2,3-dihydroxybenzoate dehydrogenase; OS = Streptomyces fulvissimus DSM 40593 OX=1303692; GN = SFUL_5263 PE=3 SV=1
MEGKTALVTGAAGGIGAEVVRQLAGQGVTVAAVDRDRELLHETTQKLAADGLGVLPFPADVSSAAEVEAVVEAVEGRLGPVDLLVNGAGVLRLGGVGELSEDDWNATFAVNTTGVFLMSRAVVRRMTARGGGAVVTVASNAAGTPRMEMAAYAASKAAATMFTKCLGLEAAAHGIRCNVVAPGSTDTPMLRSMWHDESGPRATLQGSLDSHRLGIPLAKVATVTDVADAVVFLLSDRASHITMHTLTVDGGATLGV

SEQ ID NO: 92189 - protein, 256 aa, Streptomyces glaucescens
  REGION 1..256: note = tr|A0A089XC03|A0A089XC03_STRGA 2,3-dihydro-2,3-dihydroxybenzoate dehydrogenase; OS = Streptomyces glaucescens OX=1907 GN=dhbA PE=3 SV=1
MEGRIALVTGAAGGIGEAVVRALAAHGARVVAVDRNAERLREIAKSVGEDGGRAEAFVADVTSSADVEALVEDVETTVGPIDYLVNGAGVLRMGEARKLTDEEWAVTFAVNTSGVFFTSRAVVNRMVPRRRGAIVTIASNAAGTARTEMSAYAASKAAATMFTKCLGLEVAKHGIRANLVAPGSTDTPMLSSMWQDESSARASIEGVPDAYRVGIPLGRLARPEDVAEAVVFLLSDKAAHITMHDLTVDGGAALGV

SEQ ID NO: 92190 - protein, 262 aa, Streptomyces globisporus
  REGION 1..262: note = tr|A0A423V2D1|A0A423V2D1_STRGL 2,3-dihydro-2,3-dihydroxybenzoate dehydrogenase; OS = Streptomyces globisporus OX=1908 GN=D3105_09640 PE=4; SV = 1
MEMPGITGRVVVVTGAGRGIGAAVARLLGRHGAQVALWDTDPVTVTEVASELDAAGVKATAVCVDVRDSAAVEAATVQVEHTLGPVDLLVNVAGMLRTGALMEFTDEEWDEIFAVNVRGVFTVSRSVAGRMARRGHGAVVTVASNAGGVPRTGMGAYAASKAASSMLTKSLGLELATQGVRCNVVSPGSTDTPMLRDMWDAAGEGATEATVRGSLDAFRVGIPLGRVGTPEQVAQAVLFLLSDQASHITLQDLYVDGGAALG

SEQ ID NO: 92191 - protein, 260 aa, Streptomyces globosus
  REGION 1..260: note = tr|A0A344TZ17|A0A344TZ17_9ACTN 2,3-dihydro-2,3-dihydroxybenzoate dehydrogenase; OS = Streptomyces globosus OX=68209 GN=C0216_10835 PE=4 SV=1
MPVRAGGNPPPVALVTGAARGIGAAVVDGLVREGVAVAAVDVDEGGLAELAERSAGLVVPFAADVSDRAAVADVVAAVEKGIGPIETGVSVAGILRPGLLCDTTDEDWDETFAVNTTGVFLVLRELARRMVPRGRGALVTVASNAAGVPRAGMGAYAASKAASAMLTRCLGLEVARHGIRCNVVSPGSTDTRMQRQLWTGEDDLERVIAGTPEEFRTGIPLGRIADPADIAEAVLFLVSDRARHITMQNLFVDGGATLRA

SEQ ID NO: 92192 - protein, 319 aa, Streptomyces griseorubiginosus
  REGION 1..319: note = tr|A0A385ZD68|A0A385ZD68_9ACTN 2,3-dihydro-2,3-dihydroxybenzoate dehydrogenase; OS = Streptomyces griseorubiginosus OX=67304 GN=entA PE=4; SV = 1
MSTAQHKIGSGFGAHSTADDVLAGVDLSGKLAIVTGGYSGLGLETTKALVKAGARVVVPARRPDTAKEALAGLDGVEQDVLDLGDLDSVHAFAERFLASGRTIDLVIDNAGIMACPETRVGPGWEAQFATNHLGHFALVNRLWSAIEPGGARVVSVSSRAHHFSGMRWDDVHWRTGYDKWQAYGQAKTANVLFAVHLDKLGAERGVRAFSLHPGGILTPLQRHLPKAEMVERGWIDEQGNALNPSGFKSPEQGAATQVWAATSPQLDGMGGVYLEDCDIAEPAVDGDQSGGVRAWATDPEQAARLWTLSAELTGVNAFA

SEQ ID NO: 92193 - protein, 276 aa, Streptomyces griseus
  REGION 1..276: note = tr|A0A2X2M9U4|A0A2X2M9U4_STRGR 2,3-dihydro-2,3-dihydroxybenzoate dehydrogenase; OS = Streptomyces griseus OX=1911 GN=dhbA PE=4 SV=1
MPEHIPGRSGEFTGRTALVTGAAQGIGAAVADLLATLGARVAATDRARPGVEALAAEWSLAQEKTPDGERSEGSLTPYVMDVTDRGSVESTVAAIERRLGPVDVLVNVAGILRTGPAAVLSAQDWADTFAVNTTGVYHVSQAVAPLMAARGSGAVVTVGSNAAGIPRTGMAAYAASKAAAAMFTKCLGLELAGSGVRCNVVAPGSTDTPMQRALWTGPGAEQRVIDGDPSTYRTGIPLGRIADPGDIAETVAFLASDRARHITMQELYVDGGATLR

SEQ ID NO: 92194 - protein, 268 aa, unidentified
  source 1..268: note = Streptomyces hoynatensis
  REGION 1..268: note = tr|A0A3A9YSN8|A0A3A9YSN8_9ACTN 2,3-dihydro-2,3-dihydroxybenzoate dehydrogenase; OS = Streptomyces hoynatensis OX=1141874 GN=D7294_22745 PE=4; SV = 1
MAAHQAAQAREFEGRVALVTGAGSGIGLATARLLAERGAQVVAADRAPAAAAPGPGAGSATGSGALHAVRLDVTEGPRVRAVVAETERRFGRIDVLVNAAGILRPGTVAELADEDWADTLDVNATGVMRVSRAVAPGMAARRSGAIVTVGSDAAGLARTGMAAYAAAKAAAVAFTRCLGLELARHGVRCNIVSPGATDTPLQRRLWTSPEAAAQAVAGDPARYRGPIPLGRLADPADVAEAIAFLASDRARHVALHELRVDGGATLHR

SEQ ID NO: 92195 - protein, 255 aa, Streptomyces ipomoeae
  REGION 1..255: note = tr|L1KUS6|L1KUS6_9ACTN 2,3-dihydroxybenzoate-2,3-dehydrogenase OS=Streptomyces ipomoeae 91-03 OX=698759 GN=STRIP9103_03574 PE=3 SV=1
MDDKVALVTGAAGGIGEAVVRTLAERGAMVAMLDRNADRLEELAEKVRVSGGRAEAFPADVTDSAAVEAVVEQAEQRLGPLDYLVNAAGVLRLGQARGLTDEDWATTFAVNTAGVFFVSRAVVNRMVERRQGAIVTIASNAAGTARVDMAAYSASKAAATMFTKCLGLEVSRFGIRCNVVAPGSTDTQMLTALWDDGAEQASIDGVSSAFRVGIPLGRIARPQHIADAVVFLLSDQAAHITMHDLTVDGGAALGH

SEQ ID NO: 92196 - protein, 255 aa, Streptomyces ipomoeae; identical to SEQ ID NO: 92195
  REGION 1..255: note = tr|A0A540P8I0|A0A540P8I0_9ACTN 2,3-dihydro-2,3-dihydroxybenzoate dehydrogenase; OS = Streptomyces ipomoeae OX=103232 GN=Sipo7851_34435 PE=3; SV = 1

SEQ ID NO: 92197 - protein, 120 aa, unidentified
  source 1..120: note = Streptomyces jeddahensis
  REGION 1..120: note = tr|A0A177HPB0|A0A177HPB0_9ACTN 2,3-dihydro-2,3-dihydroxybenzoate dehydrogenase; OS = Streptomyces jeddahensis OX=1716141 GN=dhbA PE=4 SV=1
MGASEFAGLMAVVTGGASGVGLATARLLAARGACVACLDLRPDAMPAPLVDTPADAADDVTVRAAVEEAARWFGGLGILASSAGIGAQGIISPSSAAWADYGFGPAPDLPRETVRRKNQP

SEQ ID NO: 92198 - protein, 275 aa, Streptomyces kanamyceticus
  REGION 1..275: note = tr|A0A5J6GII8|A0A5J6GII8_STRKN 2,3-dihydro-2,3-dihydroxybenzoate dehydrogenase; OS = Streptomyces kanamyceticus OX=1967 GN=CP970_25110 PE=4; SV = 1
MPEHIPQEPGEFTGRTALVTGAGQGIGAAVATALAARGAHVVATDRDAHGIDELAAATRGSTAAPGTLATRGAITPRVMDVTDHRAVSTVIGDVIRDHGSLDLLVNVAGILRTAPVAELTDADWADTFAVNTTGVFHTSRAAAAHMTARGSGCIVTVASNAAGIPRTGMAAYAASKAAATMFTKCLGLEIARSGVRCNVVAPGSTDTAMQRSLWTDDEAPRRVIAGDTETYRTGIPLGRIADPQDIADAVLFLASDRARHITLQELYVDGGATLR

SEQ ID NO: 92199 - protein, 259 aa, Streptomyces kasugaensis
  REGION 1..259: note = tr|A0A4Q9HRI2|A0A4Q9HRI2_STRKA 2,3-dihydro-2,3-dihydroxybenzoate dehydrogenase; OS = Streptomyces kasugaensis OX=1946 GN=EYS09_23070 PE=4; SV = 1
MRETELSGRTALVTGAGRGIGAAVARLLADQGARVVAVDRDADGVTALEDEYGAGRITGRAVDITDRAAVDALVTDAERTAGPLDILVNVAGVLRTAPVVELTDQDWDDTFAVNTTGVFQLSRAVARTMTTRRSGCIVTVGSNAAGVPRAGMAAYAASKAAATLFTKCLGLELARSGVRCNVVSPGSTDTPMQRQLWTGPEARDRIIDGDPESYRVGIPLGRIAEPRDIAEAVGFLVSDRARHITMHDLYVDGGATLRA

SEQ ID NO: 92200 - protein, 259 aa, unidentified
  source 1..259: note = Streptomyces klenkii
  REGION 1..259: note = tr|A0A3B0BHZ5|A0A3B0BHZ5_9ACTN 2,3-dihydro-2,3-dihydroxybenzoate dehydrogenase; OS = Streptomyces klenkii OX=1420899 GN=D7231_13375 PE=4 SV=1
MQQSELSGRVALVTGAGQGIGEAVTRALVARGARVAALDWTPDGIKDLEAEFGRDKVTAHTADVADSTAVEAVVDEVENTVGPLGILVNVAGVLRTSPVVDITDDVWHRTFAVNSTGVFNASRAVARRMTERRSGCIVTVGSNAAGVPRTSMAAYAASKAAATMFTKCLGLELGRSGIRCNVVSPGSTDTAMQRGLWADDQAPQRVIDGDPGSYRVGIPLGRIAEPADIADAVAFLVSDRARHITMHDLYVDGGATLRA

SEQ ID NO: 92201 - protein, 264 aa, Streptomyces lavendulae
  REGION 1..264: note = tr|A0A5C8GZ00|A0A5C8GZ00_STRLA 2,3-dihydro-2,3-dihydroxybenzoate dehydrogenase; OS = Streptomyces lavendulae OX=1914 GN=E2C11_17875 PE=4 SV=1
MSGEPELTGRAALVTGAARGIGAAVVEALAAGGARVLATDVDGAAVAELAARYEGRVTGRELDVTDATAVEDLIAEAERTLGPLDIVVNVAGVLRGAAVADLDDADWAAVFAVNTDGVFHVCRAAARRMTERRRGSIVTVASNAAGVPRAGMAAYAASKAAAVMFTKCLGLEVAPYGVRCNTVSPGSTDTDMQRAMWDRAPGGPDSGRRAVIEGDLASYRTGIPLGRLAEPSDIADAVAFLVSDRARHITLHDLYVDGGATLRA

SEQ ID NO: 92202 - protein, 259 aa, unidentified
  source 1..259: note = Streptomyces luteoverticillatus
  REGION 1..259: note = tr|A0A3Q9G2P5|A0A3Q9G2P5_STRLT 2,3-dihydro-2,3-dihydroxybenzoate dehydrogenase; OS = Streptomyces luteoverticillatus OX=66425 GN=EKH77_26075; PE = 4 SV=1
MEQSALAGRIALVTGAGQGIGEAVTRALVAQGARVAAVDATEDGVKALETEYGTEKVTHYTADVSDSRAVEAVFEEVERTAGPLDILVNVAGVLRTSPVVEITDEDWKRTFDVNSTGVFNTSRAAARRMSERRSGCIVTVGSNAAGVPRTSMAAYAASKAAATMFTKCLGLELARSGVRCNVVSPGSTDTAMQRSLWSGDEPPAGVIDGDPGSYRVGIPLGRIAEPSDIADAVLFLVSDRARHITMHDLYVDGGATLRA

SEQ ID NO: 92203 - protein, 259 aa, Streptomyces malaysiensis
  REGION 1..259: note = tr|A0A291T402|A0A291T402_9ACTN 2,3-dihydro-2,3-dihydroxybenzoate dehydrogenase; OS = Streptomyces malaysiensis OX=92644 GN=DNK48_04565 PE=4; SV = 1
MRLTGIAEVTALVTGAAGAIGAATARQLAAEGAIVAVADIDENGAHTVAGHLGPAAHPVRLDVTDSGDVERAVRDVEDRLGPIGILVNAAGVLGRTAPLTEQEDAEWERVFGVNVRGTFNCVRAVGRRMARRGRGCVITVASNSAGIVKYDQGLYGASKAAAQYLTNCAGLELAEHGVRSVVVAPGTTESPMSRSNAHLPGRRQALLHGDPARHRVGIPRGTLAEPEDIASVIGFLASDQAAHMTITTVTVDGGSTLRP

SEQ ID NO: 92204 - protein, 264 aa, Streptomyces netropsis
  REGION 1..264: note = tr|A0A445NJJ2|A0A445NJJ2_STRNE 2,3-dihydro-2,3-dihydroxybenzoate dehydrogenase; OS = Streptomyces netropsis OX=55404 GN=dhbA PE=4 SV=1
MGGTVVQQSELAGRVALVTGAGQGIGEAVTRALVARGARVAALDRSTEGVKELEAEFGAERVVAHSADVADSLAVDAVVDEVERTLGPIAILVNVAGVLRTSPVVDITDEVWDRTFAVNSTGVFNTSRAVARRMSERRDGCIVTVGSNAAGVPRTSMAAYAASKAAATMFTKCLGLELARSGVRCNVVSPGSTDTAMQRGLWADEQAPQRVIDGDPGTYRVGIPLGRIAEPADIADAVTFLVSDRARHITMHDLYVDGGATLRV

SEQ ID NO: 92205 - protein, 265 aa, Streptomyces nitrosporeus
  REGION 1..265: note = tr|A0A5J6F3N6|A0A5J6F3N6_9ACTN 2,3-dihydro-2,3-dihydroxybenzoate dehydrogenase; OS = Streptomyces nitrosporeus OX=28894 GN=CP967_01490 PE=4; SV = 1
MSADQELAGRLALVTGAGRGIGEAVVHALAERGARVLATDLDTAGVEAAVAGRYDGRVTARRLDVTDAAAVEELVADVEDTLGPLDIAVNVAGILRGSPVAELTDEDWAATFAVNTGGVFHVSRAASRRMAGRGSGAIVTVASNAAGIPRTNMAAYASSKAAAVMFTKCLGLEVASSGVRCNTVSPGSTLTDMQRGMWADAGADPEAAARSVLEGDLAGYRTGIPLGRMADPSDVADAVAFLVSDRARHITMHDLYVDGGATLRA

SEQ ID NO: 92206 - protein, 276 aa, Streptomyces parvus
  REGION 1..276: note = tr|A0A5D4IWY9|A0A5D4IWY9_9ACTN 2,3-dihydro-2,3-dihydroxybenzoate dehydrogenase; OS = Streptomyces parvus OX=66428 GN=FY004_23470 PE=4 SV=1
MPEHIPGRSGEFIGRTALVTGAAQGIGAAVADLLATLGARVAATDRVLPGIEATAAEWARKQEKLPADERSAGSLDPYVMDVTDRSSVESTVARVERQLGPVDVLVNVAGILRTGPAAVLSAQDWADTFAVNATGVFHVSQAVAPLMAARGSGAVVTVGSNAAGIPRSGMAAYAASKAAAAMFTKCLGLELARSGVRCNVVAPGSTDTPMQRALWTDPGAEQRVIDGDLSAYRTGIPLGRIADPGDIAETVAFLASDRARHITMQELYVDGGATLR

SEQ ID NO: 92207 - protein, 266 aa, Streptomyces scabiei
  REGION 1..266: note = tr|A0A100JMC5|A0A100JMC5_STRSC 2,3-dihydro-2,3-dihydroxybenzoate dehydrogenase; OS = Streptomyces scabiei OX=1930 GN=dhbA_1 PE=3 SV=1
MDVGGTDNVDGIANSVALVTGAAGGMGEAVVRTLAERGAVVAMLDQRADRLEELAARIRESGGRAEAFPADVTDGAAVESAVERVERRLGPLAHLVNGAGVLRPGRAWALTDEDWASTFAVNTAGVFHVSRAVVRRMIERRRGAIVTVASNAAGTPRMDMAAYVASKAASTMFTKCLGLEVSRFGIRCNVVAPGSTDTPMLTALWDADAERASVEGVSSAFRVGIPLGRIARPQHIADAVVFLLSDRAAHITMQDLTVDGGAALGH

SEQ ID NO: 92208 - protein, 308 aa, Streptomyces sp.
  REGION 1..308: note = tr|A0A2P8AKW1|A0A2P8AKW1_9ACTN 2,3-dihydro-2,3-dihydroxybenzoate dehydrogenase; OS = Streptomyces sp. 111WW2 OX=1945515 GN=entA_1 PE=4 SV=1
MNHWTPGDIPDQAGRTALITGGNSGIGLETARALARHGARVILAGRSRTRLDQAAEAVRAATPEARTDTLVLDLSDLSSVRDAATRIAETETVDLLFNNGGVMNLPERRTTHDGLEMTVGTNHLGHFAFNAQVWPAVRRSPAPRVVTVSAIAARWPMGRLEDLMSEKSYRAMGAYAKSKRANIVYTLELARRTASSPVEALVVHPGAAMTNLQQHGTGPLSRMVTPIAARLLMGSAEGAAWPSLYAATSPHVQSGWFIGPAGRDQTSGTPRPAKLPTGADDPAEGRRLWAASEQLTGVPFDIEAEAAV

SEQ ID NO: 92209 - protein, 256 aa, Streptomyces sp.
  REGION 1..256: note = tr|A0A552R738|A0A552R738_9ACTN 2,3-dihydro-2,3-dihydroxybenzoate dehydrogenase; OS = Streptomyces sp. 130 OX=2591006 GN=FKN01_16225 PE=3 SV=1
MENRTAVVTGAAGGIGRAVIRSLAERGATVAAVDRDAEALDAAVAELRAEGHDVHPYVVEITDAGAVRELVDTVEQRLGPIEYLVNGAGVLRLGNVRTFSAEDWALTFAVNTTAVFHVSRAVIDRMMERRRGSVVTVASNAASTPRAGMAAYAASKAAATLFTKSLGLEAAPYGIRCNLVAPGSTDTPMLRSMWHDETGPKHTVEGRPEEFRLGIPLGKVAQPEDIAAAVTFLLSDEASHITLHDLTVDGGATLGA

SEQ ID NO: 92210 - protein, 256 aa, Streptomyces sp.
  REGION 1..256: note = tr|A0A4S2IM90|A0A4S2IM90_9ACTN 2,3-dihydro-2,3-dihydroxybenzoate dehydrogenase; OS = Streptomyces sp. 1AS2c OX=2564098 GN=E5Z02_11190 PE=4; SV = 1
MEEQTALVTGAAGGIGAAVVRLLAEQGTTVVAVDRDADRLAEEVAKLRAESLQVADFPVDVSDSAAVEAVVAAAEEQIGPIDQLVNAAGVLRLGPVRDITDEDLRAMLDVNVTGVLNVTRAVVNRMIPRARGSIVTVTSNAAVTPRAGMAAYAASKAAATQLVKSLGLEVAQYGIRCNTVAPGSTDTPMLRSMWHDREAEQHTLDGSPSAYRVGIPLRRIGRPDDVAEAVAFLLSDRAAQITLHDLTVDGGASLGA

SEQ ID NO: 92211 - protein, 277 aa, Streptomyces sp.
  REGION 1..277: note = tr|A0A4V3T7Z8|A0A4V3T7Z8_9ACTN 2,3-dihydro-2,3-dihydroxybenzoate dehydrogenase; OS = Streptomyces sp. A0592 OX=2563099 GN=E6U81_36930 PE=4; SV = 1
MPEAAAPGHARFAGRVAFVTGAGRGIGEAVVRTLYAHGASVFATDIDGEAVTALAGRLAEEARAAHPDGTPPPGRLLPRRLDVADPDAVRTAVADAVAAFGPVDILVNVAGVLHTGPATAVDDAAWERLFAVNAGGVFHTARELAPAMAERGRGSIVTVASDAAGVPRVGMAAYAASKAAATMFTKCLGLEYARSGVRCNVVAPGSTDTAMQRSLWEDDRVPHRVLEGDPGRYRNAIPLGRIADPADVADAVAFLASDEARHITMQQLYVDGGASLR

SEQ ID NO: 92212 - protein, 262 aa, Streptomyces sp.
  REGION 1..262: note = tr|A0A4S2UVX3|A0A4S2UVX3_9ACTN 2,3-dihydro-2,3-dihydroxybenzoate dehydrogenase; OS = Streptomyces sp. A0642 OX=2563100 GN=E6R60_10070 PE=4; SV = 1
MSPVPELTGRLALVTGAGRGIGEAVVHALVERGARVLATDVAPEGVTALAGKHPGHVTARTLDVTDAAAVEDLVAEAEDALGPLDIAVNVAGILRSSPVAELTDEDWAATFAVNTDGVFHVSRAVSTRMAARGTGSIVTVASNAAGIPRTNMAAYAASKAAAVMFTKCLGLELAPLGIRCNTVSPGSTLTDMQRGLWPAGDEDAAARRVIEGDGASYRTGIPLGRIADPSDIADAVAFLVSDRARHITLHDLYVDGGATLRA

SEQ ID NO: 92213 - protein, 265 aa, Streptomyces sp.
  REGION 1..265: note = tr|A0A4S2TPY9|A0A4S2TPY9_9ACTN 2,3-dihydro-2,3-dihydroxybenzoate dehydrogenase; OS = Streptomyces sp. A0958 OX=2563101 GN=E6P78_29250 PE=4; SV = 1
MSTAQELTGRLALVTGAGRGIGEAVVRALVERGCRVLATDVDREGVDALAREHGGSVVARALDVTDAAAVESLVAEAEETVGALDIAVNVAGILRCSPVSELTDEDWAATFAVNTNGVFHVSRSVSRRMAERGSGSIVTVASNAAGIPRTTMAAYAASKAASVMFTKCLGLELAPRGVRCNTVSPGSTLTDMQRGMWPAGEERDDGPAARRVIAGDLASYRTGIPLGRIAEPSDIAEAVAFLVSDRARHITLHDLYVDGGATLRA

SEQ ID NO: 92214 - protein, 265 aa, Streptomyces sp.
  REGION 1..265: note = tr|A0A4S2RMS7|A0A4S2RMS7_9ACTN 2,3-dihydro-2,3-dihydroxybenzoate dehydrogenase; OS = Streptomyces sp. A1277 OX=2563103 GN=E6R18_20925 PE=4; SV = 1
MTTEQELTGRLALVTGAGRGIGEAVVRALAERGCRVLATDVDREGVDALARELGENVVARALDVTDAAAVDALVAEAEESVGALGIAVNVAGILRCSPVSELTDEDWAATFAVNTNGVFHVSRAVSRRMAERGAGSIVTVASNAAGIPRTTMAAYAASKAASVMFTKCLGLELAPRGVRCNTVSPGSTLTDMQRGMWPAGEERDDGPAARRVIAGDLASYRTGIPLGRIAEPSDIAEAVAFLVSDRARHITLHDLYVDGGATLRA

SEQ ID NO: 92215 - protein, 316 aa, Streptomyces sp.
  REGION 1..316: note = tr|A0A4S3G296|A0A4S3G296_9ACTN 2,3-dihydro-2,3-dihydroxybenzoate dehydrogenase; OS = Streptomyces sp. A1499 OX=2563104 GN=dhbA PE=3 SV=1
MPEHIPNGPYAEGEFAGRTALVTGAGQGIGAAVAAALAARGAHVIATDREPGRAADGAMGRGSGRAADRGPGREPGRDADGEPGRDGSGAAGSEPGRAAAHEPGKAAYAPGTITPRAMDVTDPAAVSRVIDETVRDLGALDILVNVAGILRTAPVAELTDADWADTFAVNTTGVFHASRAAASHMTARGSGCIVTVASNAAGIPRTGMAAYAASKAAATMFTKCLGLEIARSGVRCNVVAPGSTDTAMQRALWPDGQAEAPSSVIAGDPATYRTGIPLGRIAAPEDIAEAVVFLASDRARHITLQELYVDGGATLR

SEQ ID NO: 92216 - protein, 256 aa, Streptomyces sp.
  REGION 1..256: note = tr|A0A4S2RTA4|A0A4S2RTA4_9ACTN 2,3-dihydro-2,3-dihydroxybenzoate dehydrogenase; OS = Streptomyces sp. A1547 OX=2563105 GN=E6W17_27940 PE=4; SV = 1
MEGKIALVTGAAGGIGEAIVRALASRGVRVAAVDRDAHRLRDVAKSVAEEGGRVDPFPADVTSSADVESLVDDVEALVGPLDFLVNAAGVLRLAEARTLTDQEWSTTFAVNTTGVFFVSRAVVNRMVPRRRGAIVTIASNAAGTARTEMSAYAASKAAATMFTKCLGLEVAKFGIRANLVAPGSTDTPMLNSMWQDESSARASIDGVPDAYRVGIPLGKLARPEDVAEAVVFLLSDKAAHITMHDLTVDGGAALGA

SEQ ID NO: 92217 - protein, 278 aa, Streptomyces sp.
  REGION 1..278: note = tr|A0A384I7N6|A0A384I7N6_9ACTN 2,3-dihydro-2,3-dihydroxybenzoate dehydrogenase; OS = Streptomyces sp. AC1-42W OX=2218666 GN=DNK56_16000 PE=4; SV = 1
MAPHSTPAAPRPVPAGEGELAGRLALVTGAGRGIGEAVVRALVARGCRVLATDADPEGIDALAGEHDGLVVARTLDVTDAAAVETAVAETEESLGTLDIAVNVAGILRCSPVTELTDEDWAATFAVNTDGVFHVSRSVARRMAGRGAGSIVTVASNAAGIPRTTMAAYAASKAAAVMFTKCLGLELAPLGIRCNTVSPGSTLTDMQRAMWPAGEDRDDGPAARRVIAGDLPSFRTGIPLGRIAEPADVAEAVAFLVSDRARHITLHDLYVDGGATLRA

SEQ ID NO: 92218 - protein, 277 aa, Streptomyces sp.
  REGION 1..277: note = tr|A0A370B5U3|A0A370B5U3_9ACTN 2,3-dihydro-2,3-dihydroxybenzoate dehydrogenase; OS = Streptomyces sp. AC230 OX=2282652 GN=DVH02_26460 PE=4; SV = 1
MSPHPHAPSQPSPHTGQDLAGRLALVTGAGRGIGEAVVVALLAQGARVLATDRDADDVAALARRHGAEVTDRQLDVTDAAAVEALVAEAEETLGPLDIAVNVAGIMRSSQAVELTDEDWATTFAVNTNGVFHVARSTVRRMAERGRGSFVTVASNAAGIPRAGMAAYAASKAAAVMFTKCLGLEVAARGVRCNTVCPGSTLTDMQRALWAGSGPEAEEAAARRVVEGDLAAHRTGIPLGRIADPADIADAVAFLVSDRARHITLHDLYVDGGATLRA

SEQ ID NO: 92219 - protein, 276 aa, Streptomyces sp.
  REGION 1..276: note = tr|G0Q136|G0Q136_9ACTN 2,3-dihydro-2,3-dihydroxybenzoate dehydrogenase; OS = Streptomyces sp. ACT-1 OX=1609288 GN=SACT1_7088 PE=4; SV = 1
MPEHIPGRSGEFTGRTALVTGAAQGIGAAVADLLATLGARVAATDRARPGVEALAAEWSLAQEKTPDGERSKGSLTPYVMDVTDRGSVESTVAAIERQLGPVDVLVNVAGILRTGPAAVLSAQDWADTFAVNTTGVYHVSQAVAPLMAARASGAVVTVGSNAAGIPRTGMAAYAASKAAAAMFTKCLGLELAGSGVRCNVVAPGSTDTPMQRALWTGPGAEQRVIDGDPSTYRTGIPLGRIADPGDIAETVAFLASDRARHITMQELYVDGGATLR

SEQ ID NO: 92220 - protein, 256 aa, Streptomyces sp.
  REGION 1..256: note = tr|A0A3N6DMB4|A0A3N6DMB4_9ACTN 2,3-dihydro-2,3-dihydroxybenzoate dehydrogenase; OS = Streptomyces sp. ADI91-18 OX=1522755 GN=dhbA PE=4 SV=1
MQGKTALVTGAAGGIGEAVVRALASRGVRVAAVDLNAERLREAAKAAVEDGLDVTAFPADVTLSTEVDEVVAEVESALGPIDYLVNAAGVLRMGAARSLSDEEWAVTFAVNTTGVFFMSRAVVNRMVARESGALVTVASNAAGTARAEMSAYAASKAAATMFTKCLGLEIAKYGIRANLVAPGSTDTPMLTSMWEDDSHARVSIEGNPETFRVGIPLGKLAQPQDVADAVVFLLSDEASHITMHDLTVDGGAALGV

SEQ ID NO: 92221 - protein, 255 aa, Streptomyces sp.
  REGION 1..255: note = tr|A0A3N6EW64|A0A3N6EW64_9ACTN 2,3-dihydro-2,3-dihydroxybenzoate dehydrogenase; OS = Streptomyces sp. ADI93-02 OX=1522757 GN=entA PE=3 SV=1
MYVNSADQAFSDHVALITGAGSGIGRAAAIAFAEAGAHVLGIGRREEPLKETAAAHANIEVLAMDITDDGAPAKAVSDAVRRWGRLDYLVNNAGATAVMPLAESEQQVIVDLLALNVVAPSLLAHEALPHLRETKGTIVNVSSTYGHRPMAGGAHYAASKAAVEQLTRSWALELAGEGVRVNCVAPGPTQTDVMLHAGLTQEASNEMYAYERDRIPTHHVAGAEEMAHWVLRMAEPTGRHATGQIITVDGGLELI

SEQ ID NO: 92222 - protein, 256 aa, Streptomyces sp.
  REGION 1..256: note = tr|A0A3G4VZ51|A0A3G4VZ51_9ACTN 2,3-dihydro-2,3-dihydroxybenzoate dehydrogenase; OS = Streptomyces sp. ADI95-16 OX=1522758 GN=dhbA PE=4 SV=1
MQGKTALVTGAAGGIGEAVVRALASRGVRVAAVDLNAERLREAAKAAVEDGLDVTAFPADVTLSSEVDEVVAEVESALGPIDYLVNAAGVLRMGAARSLSDEEWAVTFAVNTTGVFFMSRAVVNRMVTRESGALVTVASNAAGTARAEMSAYAASKAAATMFTKCLGLEIAKYGIRANLVAPGSTDTPMLTSMWEDESHARVSIEGNPETFRVGIPLGKLAQPQDVADAVVFLLSDEASHITMHDLTVDGGAALGV

SEQ ID NO: 92223 - protein, 221 aa, Streptomyces sp.
  REGION 1..221: note = tr|A0A3N6HCU8|A0A3N6HCU8_9ACTN 2,3-dihydro-2,3-dihydroxybenzoate dehydrogenase; OS = Streptomyces sp. ADI95-17 OX=1522759 GN=dhbA2 PE=4 SV=1
MTTFALVGAGPGLGLAAARRFGAAGHHVALLSRNADHLDALAAELGGDGIRARGFTADVLDSASLTAALAAAAEELGPIEVLQFSPVPRADFMKPVLETTAAGLDDPLAFSVKGPVTCVDAVLPGMRHLGRGTLLFVNGGSAVRPNPKVAGTSVAFAAESAYAAMLHDALAPENIHVAQLIVPGAIRLDAEHSSPDALAERLYAIHTDRGAFRHYAEPMPA

SEQ ID NO: 92224 - protein, 276 aa, Streptomyces sp.
  REGION 1..276: note = tr|A0A3N6G591|A0A3N6G591_9ACTN 2,3-dihydro-2,3-dihydroxybenzoate dehydrogenase; OS = Streptomyces sp. ADI98-10 OX=1522763 GN=dhbA2 PE=4 SV=1
MPEHIPGRSGEFIGRTALVTGAAQGIGAAVADLLATLGARVAATDLALPGIEALAVGWTRTQEKLPAGERSTGSLDPYVMDVTDRSSVERTVALVERRLGAVDVLVNVAGILRTGPAAVLSAQDWADTFAVNATGVFHVSQAVAPLMAARGSGAVVTVGSNAAGIPRTGMAAYAASKAAAAMFTKCLGLELARSGVRCNVVAPGSTDTPMQRALWTDPGAGQRVIDGDPATYRTGIPLGRIADPGDIAETVAFLASERARHITMQELYVDGGATLR

SEQ ID NO: 92225 - protein, 256 aa, Streptomyces sp.
  REGION 1..256: note = tr|A0A4Q6IJR2|A0A4Q6IJR2_9ACTN 2,3-dihydro-2,3-dihydroxybenzoate dehydrogenase; OS = Streptomyces sp. F001 OX=1510026 GN=StrepF001_25940; PE = 3 SV=1
MEGKVALITGAAGGIGAAVARALGERGVTVAAVDRDADGLLHTVQKLTADGVSARAFPADITGRAEVDALVDTVEQQLGPLDFLVNAAGVLHLGEARHLTDQDWDATFAVNATGVFVVSRAVVNRMVPRRRGAIVTVASNAAGTARTQMAAYAASKAAATMFTKCLGLEVAGHGIRCNLVAPGSTDTPMLSSMWRDNSGRRTTIAGRPEEYRVGIPLGKLAMPSDVADAVAFLLSDRAAHITLHSLTVDGGATLGG

SEQ ID NO: 92226 - protein, 322 aa, Streptomyces sp.
  REGION 1..322: note = tr|A0A1K2FI94|A0A1K2FI94_9ACTN 2,3-dihydro-2,3-dihydroxybenzoate dehydrogenase; OS = Streptomyces sp. F-1 OX=463642 GN=entA_1 PE=4 SV=1
MTTAQHKIGSGFGARSTADDVLRGIDLTGRLALVTGGYSGIGLETTRSLVRAGARVVVPARRPDTAEQALGGLPGVEVDEMDLGDLESVRAFAERFLGSGRTLDMVIGSAGIMACPETRVGPGWEAQFATNHLGHFALVNRLWPAIAAGGARVVSVSSRGHHAGGIRWDDVNWRQGYDKWEAYGQAKTANVLFAVHLDKLGRDAGVRAFALHPGGILTPLQRYLGKEEQIERGWIDENGTVLHPEAFKTPQQGAATQVWAATSPQLDGLGGLYLEDCDVAEPAPADGEREGVKDWAIDPEQAARLWALSAELTGVDAFADRA

SEQ ID NO: 92227 - protein, 269 aa, Streptomyces sp.
  REGION 1..269: note = tr|A0A345HY51|A0A345HY51_9ACTN 2,3-dihydro-2,3-dihydroxybenzoate dehydrogenase; OS = Streptomyces sp. GSSD-12 OX=2282738 GN=DVK44_32320 PE=4; SV = 1
MSIEASPTATALGADRSAVAVVTGAAGGIGAVVARALAATGVPVALLDRDIMPLWELAAELDGSAGGVLAVAADVTDSADVDSAIAKVEAELGPVTYLVNGAGVLRSGPASELTDEEWDITFAVNTSGVFHVSRAVSRVMVPRGRGSIVTIASNAAMTPRASMAAYAASKAASSMFTKCLGLELARHGIRCNVVAPGSTRTPMLTALQGDAAERASVDGTPDTYRVGIPLGRIAEPAHIAEAVLFLLSDRSAHITMHDLTVDGGASLGA

SEQ ID NO: 92228 - protein, 264 aa, Streptomyces sp.
  REGION 1..264: note = tr|A0A1V2MUC5|A0A1V2MUC5_9ACTN D-beta-hydroxybutyrate dehydrogenase OS=Streptomyces sp. IB2014 011-1 OX=1844478 GN=bdhA_1 PE=4 SV=1
MRIDLTGKNAVVTGSSQGIGLAIATGLAAAGAEVVLTGRGQERLDGAARSLRAEVAEAAVTTVACDLTTEEGAAELYAAVPETDVLVNNLGIFGSRPPLEITDEEWRTYFDTNVLSAVRLIRHYLPPMTGQGWGRVLNIASDSAIVIPAEMIHYGMSKTALLAVSRGFAKEAAGTGVTVNSVIAGPTHTGGVEDFVHELVDKALPWEEAQREFMRLHRPQSLLQRLIEPEEIANLVVYLSSAQASATTGAAVRVDGGYVDSIVP

SEQ ID NO: 92229 - protein, 256 aa, Streptomyces sp.
  REGION 1..256: note = tr|A0A2Z4UZK3|A0A2Z4UZK3_9ACTN 2,3-dihydro-2,3-dihydroxybenzoate dehydrogenase; OS = Streptomyces sp. ICC1 OX=2099583 GN=DRB96_19735 PE=4; SV = 1
MIAVVTGAAGGIGAAVARLLAERGITVAAVDLDPGRLSAVVDELTADGLPVWAHPADVTSSAEAEAVVAEVERVAGPIGYLVNAAGVLLLAESRALTDRDWHSTFAVNTNGVFFMSRSVVNRMIPRRQGAIVTVGSNAASIARGAMAAYAASKAAASAFTKCLGLEVAQYGIRCNLVAPGSTDTPMLHGMHSGGDAAAASVAGDHAAYRVGIPLGKVASPQDVAHAVRFLLSEEAGHITMHDLTVDGGATLGAQVY

SEQ ID NO: 92230 - protein, 295 aa, Streptomyces sp.
  REGION 1..295: note = tr|A0A552YGH9|A0A552YGH9_9ACTN 2,3-dihydro-2,3-dihydroxybenzoate dehydrogenase; OS = Streptomyces sp. IF17 OX=1830119 GN=FNX48_14885 PE=3; SV = 1
MIVRARAAPSGDVVPQPARHIVEPAGRHGAELAGLTALVTGAGGGIGEAVVRVLVGMGARVAATDRETDAIRALEKEFGPKFVTSHPLDVTDPGAVEAVVDGIERDIAPLGALVNVAGVLRVAPATELTDRDWAETFAVNTTGVFHTSRAVARRMTARRSGCIVTVGSNAAGVPRTGMAAYAASKAAAAQFTKCLGLEVARSGVRCNVVSPGSTDTAMQRQLWPGPPDDPDGAATADARRRVIDGDPETYRTGIPLGRIAEPVDVAEAVAFLLTDRARHITLHDLYVDGGATLRV

SEQ ID NO: 92231 - protein, 256 aa, Streptomyces sp.
  REGION 1..256: note = tr|A0A5C6WR14|A0A5C6WR14_9ACTN 2,3-dihydro-2,3-dihydroxybenzoate dehydrogenase; OS = Streptomyces sp. ISID311 OX=2601673 GN=FS847_00105 PE=3; SV = 1
MEDAVALVTGAAGGIGAAVVRALGRHRTRVAAVDRDARRLNDVVGKMVADGLSVEAFPADVTRAAEVEELVDAVESALGPVDYLVNAAGVLRLGPVRQQTDEDWAATFAVNTTGVMQVSRAVVNRMVLRSRGSIVTVASNAAGTPRMEMAAYAASKAAATMFTKCLALEVAGHGIRCNVVAPGSTDTAMLRSMWQDETGPQATIDGRPEAYKVGIPLGKLARPADIADAVVFLLSQQAGHITMHDLTVDGGATLGV

SEQ ID NO: 92232 - protein, 284 aa, Streptomyces sp.
  REGION 1..284: note = tr|A0A4U0P828|A0A4U0P828_9ACTN 2,3-dihydro-2,3-dihydroxybenzoate dehydrogenase; OS = Streptomyces sp. jys28 OX=2571125 GN=FCH28_01685 PE=4; SV = 1
MSDSIRLGLPKLIRGEVSEKGYDVRESELSGRTALVTGAGRGIGEAVARLLAERGAHVVAVDRDAAGITALEANSSSGPARITARTVDITDRPAVDALVDEVERTVGPLDILVNVAGVLRTGSVVELTDQDWADTFAVNTTGVFQVCRAVARRMTARRSGSIITVGSNAAGVPRAGLAAYAASKAAATLFTKSLGLELARTGVRCNVVSPGSTNTPIQRQLWTEPDSRGRVIEGDLAAYRVGIPLGRLAEPVDIAEAVGFLVSDRARHITMHDLYVDGGAALRA

SEQ ID NO: 92233 - protein, 271 aa, Streptomyces sp.
  REGION 1..271: note = tr|A0A3Q8VTJ4|A0A3Q8VTJ4_9ACTN 2,3-dihydro-2,3-dihydroxybenzoate dehydrogenase; OS = Streptomyces sp. KPB2 OX=2305221 GN=D1J63_10945 PE=3; SV = 1
MHSAHASDGDTGDDTASGLALVTGAAGGIGAAVVRTLAERGLRVAAVDRHAGRLGEEVAKLAADGLPVTAHAADVTDSAAVEAVVDEIEGTLGPVDRLVNAAGVLRLGEVTAFTDDDWTSTFAVNTTGVFHLSRAVVSRMVRRGGGAVVTVASNAAATPRSGMAAYAASKAAAEMFTKSLGLEVARHGVRCNIVAPGSTDTPMLSSMWHDESGPRATLAGNLEAFRVGIPLGKLARPADVAEAVAFLLSDRASHITLHTLTVDGGAALGAA

SEQ ID NO: 92234 - protein, 276 aa, Streptomyces sp.
  REGION 1..276: note = tr|A0A367E6Y7|A0A367E6Y7_9ACTN 2,3-dihydro-2,3-dihydroxybenzoate dehydrogenase; OS = Streptomyces sp. LHW50302 OX=2250578 GN=DQ392_32320; PE = 4 SV=1
MSTTHRTAPGASRPLAPELDGRVALVTGAARGIGAAVVRALVAQGAHVLATDLEPAGVEKLAAEHPGQVTARPLDVADAAAVEALLAESDRLLGPLDIAANVAGILRISEVTELSDADWAATFAVNTNGVFHVSRAAARRMSERGSGSIVTVASNAAGIPRTGMAAYAASKAAAVMFTKCLGLEVAGRGVRCNTVSPGSTLTDMQRACWGPGADDEAAAARRVVEGDLATYRTGIPLGRIADPADVAEAVVFLASDRARHITLHDLYVDGGAALRA

SEQ ID NO: 92235 - protein, 221 aa, Streptomyces sp.
  REGION 1..221: note = tr|A0A2K8RG95|A0A2K8RG95_9ACTN 2,3-dihydro-2,3-dihydroxybenzoate dehydrogenase; OS = Streptomyces sp. M56 OX=1495638 GN=dhbA_3 PE=4 SV=1
MTTLAIIGAGPGLGAAVARRFGREGYDTALIARDQGRLDALAAGLADEGVTARGFAADVRDPKTLTGALDAAATALGPIEVLQYSPVPQREFMLPVLDTTADDLAGPVEFSVYGPVTAVQQVLPGMRGLGRGTVLFVNGGTAVVPHPERAGTSIAFAAESAYGQLLHDTLAAEGIHVAQLVIPGAIVPGHDRKDPAVLADTLWTLHQDRNGFRHFADDLDS

SEQ ID NO: 92236 - protein, 261 aa, Streptomyces sp.
  REGION 1..261: note = tr|A0A1V2RFP5|A0A1V2RFP5_9ACTN 2,3-dihydro-2,3-dihydroxybenzoate dehydrogenase; OS = Streptomyces sp. MP131-18 OX=1857892 GN=STBA_20110 PE=3; SV = 1
MEVRPMKGKTALVTGAAGGVGAAVVRAIAERGGVPAAVDADGVALKEKIEALSTEGLRAEGFTADVTRRDEADATVAAVEAQLGPVDYLVNAAGILRLAEARHLSDTDWADTLAVNATGVFHMSQAVVNRMVPRRSGAVVTVASNAAGTPRKLMAAYAASKAAATMFTKCLGLEVAEYGIRCNLVAPGSTDTPMLNSMWHDDSGREATIRGDLAAYKLGIPLGKLATPQDVADAVVFLLSEEAAHITMHALTVDGGATLGV

SEQ ID NO: 92237 - protein, 264 aa, Streptomyces sp.
  REGION 1..264: note = tr|A0A553ZRS5|A0A553ZRS5_9ACTN 2,3-dihydro-2,3-dihydroxybenzoate dehydrogenase; OS = Streptomyces sp. MZ03-48 OX=2593677 GN=FNZ23_00010 PE=4; SV = 1
MSTAPELDGRLALVTGAGRGIGAAVTAALAARGARVLATDLTPGELPEAARPYAERITTRALDVTDAAAVDALVAETEETVGPLDIAVNVAGVLRGAPVTELSDEDWAATFAVNTDGVLHVSRAAARRMAARGRGSIVTVASNAAGIPRAGMAAYAASKAAAVMFTKCLGLEVAAHGVRCNTVSPGSTLTDMQRAMWTASGQDEESAARHIIEGDLAAHRTGIPLGRIADPSDIAEAVVFLVSDRARHITLHDLYVDGGATLRA

SEQ ID NO: 92238 - protein, 265 aa, Streptomyces sp.
  REGION 1..265: note = tr|A0A3M8VPD4|A0A3M8VPD4_9ACTN 2,3-dihydro-2,3-dihydroxybenzoate dehydrogenase; OS = Streptomyces sp. NEAU-LD23 OX=2486417 GN=EEJ42_26955; PE = 4 SV=1
MTEHKDTADIACRVALVTGAAGGIGTAIARALAGRGTLVAAVDKDADRLTDLVEKMAADGLTAAAFPADVTDSGRIDEVVDRIETELGAVDLLVNAAGVMRAGSALDMSDLDWRAIFSINLDGVFHCSRAVASRMKERGEGAIVTVASNAGRIPRVHMAAYGASKAAASLYTKSLGLELAEYGIRCNVVSPGSTDTDMLRALWSAEADRQTTIDGSMTTYKTGIPLRRIAEPGDIADAVVFLASDRARHITMQDLCVDGGAILGV

SEQ ID NO: 92239 - protein, 256 aa, Streptomyces sp.
  REGION 1..256: note = tr|A0A505D1R2|A0A505D1R2_9ACTN 2,3-dihydro-2,3-dihydroxybenzoate dehydrogenase; OS = Streptomyces sp. NEAU-SSA 1 OX=2315329 GN=FGD71_046285; PE = 3 SV=1
MDGKVALVTGAASGIGEAVARALGERGAVVAAVDRDADRLRRVVDKLRADGLEAQALPADVTSGADVEAVVEEAEKRLGPLEYLVNGAGVLRLGHVRNLTDEDWTTTFAVNATGVFLMSRAVVNRMLPRRRGAIVTVASNAAAAPRVQMAAYAASKAAATMFTKSLGLEVARDGIRCNVVAPGSTSTPMLTSMWHDESGPKHTVEGRLDAFRVGIPLGKLARPSDVAGAVVFLLSDEASHITLHELTVDGGAALGA

SEQ ID NO: 92240 - protein, 264 aa, Streptomyces sp.
  REGION 1..264: note = tr|A0A372LVK7|A0A372LVK7_9ACTN 2,3-dihydro-2,3-dihydroxybenzoate dehydrogenase; OS = Streptomyces sp. NEAU-YY421 OX=2293568 GN=DY218_34165; PE = 4 SV=1
MTVDQELAGRFALVTGAGRGIGEAVVHALVERGARVLATDLDPAGVAALAVKHPDRVTARALDVSDADAVERLVDEAERELGPLDIAVSVAGILRGGKVTELSDEDWAATFAVNTDGVFHLGRATARRMTERGHGSIVTVASNAAGIPRTGMAAYAASKAAAVMFTKCLGLEVSARGVRCNSVSPGSTLTEMQRAMWADSGVDETEAARRIVAGDPESYRTGIPLGRIADPEDIAEAVVFLVSDRARHITLHDLYVDGGATLRA

SEQ ID NO: 92241 - protein, 276 aa, Streptomyces sp.
  REGION 1..276: note = tr|A0A433DR55|A0A433DR55_9ACTN 2,3-dihydro-2,3-dihydroxybenzoate dehydrogenase; OS = Streptomyces sp. NP10 OX=1141731 GN=dhbA PE=4 SV=1
MPEHIPGRSGDFIGRTALVTGAAQGIGAAVADLLATLGARVAATDRALHGIEATAAEWTRTQEKLPHGERSAGSLDPYVMDVTDRGSVESTVARVERQLGPVDVLVNVAGILRTGPAAVLSAQDWADTFAVNATGVFHVSQAVAPLMAARGSGAVVTVGSNAAGIPRTGMAAYAASKAAAAMFTKCLGLELAGSGVRCNVVAPGSTDTPMQRALWTDPGAEQRVIDGDPATYRTGIPLGRIADPEDIAETVAFLASDRARHITMQELYVDGGATLR

SEQ ID NO: 92242 - protein, 256 aa, Streptomyces sp.
  REGION 1..256: note = tr|A0A552WY73|A0A552WY73_9ACTN 2,3-dihydro-2,3-dihydroxybenzoate dehydrogenase; OS = Streptomyces sp. OF1 OX=2213162 GN=FNX44_22690 PE=4 SV=1
MTDGIALVTGAAGGIGAAVARLLATRGTEVVAVDLDGGRLADVVDKFTADGLPVTARPVDVSDGSAVAELVAEVERTVGPIGQLVNTAGVLHVAPAHELTEEQWSRTFAVNADGVFHTSRAVVRRMIARRSGAIVTVASNAAGTARERMAAYAASKAAATAYTKCLGLEVARYGIRCNVVAPGSTDTTMLHGMYGDRTAAAAAVAGDLATYKVGIPLGKVALPDDVARAVAFLLSDEAGHITLHELTVDGGATLGA

SEQ ID NO: 92243 - protein, 258 aa, Streptomyces sp.
  REGION 1..258: note = tr|A0A1B9ESF3|A0A1B9ESF3_9ACTN 2,3-dihydro-2,3-dihydroxybenzoate dehydrogenase; OS = Streptomyces sp. PTY087I2 OX=1819298 GN=dhbA_2 PE=3 SV=1
MSAPLSGVALVTGAAGGIGAEVVRALSAAGLPVGLVDRDVPALWELTAELSAAGARVLAVPADVTVSKDVDMAVAKAEAELGPIENLVNAAGVLRSGPAAELSDADWDTTFAVNAGGVFHTSRAVAGVMVPRRRGSIVTIASNAAATPRMSMAAYAASKAASAMFTKCLGLELAPHGIRCNVVAPGSTRTPMLTALQGDAAERASVDGVPAAYRLGIPLGRIAEPGHIADAVLFLLSERAAHITMHDLTVDGGATLGV

SEQ ID NO: 92244 - protein, 260 aa, Streptomyces sp.
  REGION 1..260: note = tr|A0A4V3SVJ7|A0A4V3SVJ7_9ACTN 2,3-dihydro-2,3-dihydroxybenzoate dehydrogenase; OS = Streptomyces sp. RKND-216 OX=2562581 GN=E4198_22620; PE = 4 SV=1
MSARDTGVAGSVAFVTGAARGIGAAVVEELVREGATVAAVDVDAEGLSSLADRSQGRVVPFTADVADAAAIAEVVDRAERDLGPVGIGVSVAGVLRPGPLCETTDEDWADTFSVNTTGVFHVLRELGRRMTPRGRGSLVTVTSNAGGVPRAGMGAYAASKAASTMLTRCLGLELAAHGIRCNVISPGSTDTLMQRQLWTCEDDLDRVIAGSPEQYRVGIPLGRIASPADIADAVLFLVSDHARHITMQNLFVDGGATLRA

SEQ ID NO: 92245 - protein, 276 aa, Streptomyces sp.
  REGION 1..276: note = tr|A0A4P9U7X9|A0A4P9U7X9_9ACTN 2,3-dihydro-2,3-dihydroxybenzoate dehydrogenase; OS = Streptomyces sp. S6 OX=2506427 GN=EQG64_01075 PE=3 SV=1
MPEHIPGRSGEFAGRTALVTGAGQGIGAAVAELLADLGAQVAATDRAGHSIEALAADWPRRQEKLAAGERSAGRLEPYVMDVTDRVAVENTVARVEDQLGPVDILVNVAGILRTGPATTLSAQDWADTFAVNTTGVFQVSQAVAPLMVTRKTGCIVTVGSNAAGIPRTGMAAYAASKAAAAMFTKCLGLELARSGVRCNVVAPGSTDTAMQRALWTDPGAEARVIDGDPSTYRTGIPLGRIAEPADIAQAVAFLASDRARHITLQELYVDGGATLR

SEQ ID NO: 92246 - protein, 256 aa, Streptomyces sp.
  REGION 1..256: note = tr|A0A429UYX8|A0A429UYX8_9ACTN 2,3-dihydro-2,3-dihydroxybenzoate dehydrogenase; OS = Streptomyces sp. WAC04770 OX=2487423 GN=EF908_02655; PE = 4 SV=1
MEEQTALVTGAAGGIGAAVVRLLAEQGTTVVAVDRDAARLAEEVAKLRAESLQVADFPVDVSDSAAVEAVVAAAEEQIGPIDQLVNAAGVLRLGPVKDITDEDLRAMLDVNVTGVLNVTRAVVNRMIPRARGAIVTVTSNAAVTPRAGMAAYAASKAAATQLVKSLGLEVAQYGIRCNTVAPGSTDTPMLRSMWHDREAEQHTLDGSPSAYRVGIPLRRIGRPDDVAEAVAFLLSDRAAQITLHDLTVDGGASLGA

SEQ ID NO: 92247 - protein, 259 aa, Streptomyces sp.
  REGION 1..259: note = tr|A0A3R9V6Y2|A0A3R9V6Y2_9ACTN 2,3-dihydro-2,3-dihydroxybenzoate dehydrogenase; OS = Streptomyces sp. WAC05292 OX=2487418 GN=EF903_17110; PE = 4 SV=1
MTVETDKVALVSGAAGGIGAAVARALAAEGRAVALLDRDRSALDLVAKELAEDGHRVVAVAADVASPAEVTAAVDRAEEALGPVCELVNCAGVLRMGPVLDLSDDDWEATFAVNAGGVFRLSRTVGRRMAERGSGAVVTVASNAAGTARMNMSAYAASKAAATMLTKCLGLELARYGIRCNTVAPGSTYTPMLYGMYDPEDVARSSIEGLPESFRTGIPLRRIAVPPDIADAVLFLLSDRARHITMHDLVVDGGATLGA

SEQ ID NO: 92248 - protein, 274 aa, Streptomyces sp.
  REGION 1..274: note = tr|A0A3S0B6N3|A0A3S0B6N3_9ACTN 2,3-dihydro-2,3-dihydroxybenzoate dehydrogenase; OS = Streptomyces sp. WAC08241 OX=2487421 GN=EF906_34565; PE = 4 SV=1
MGTAPNGTGPRGEFAGRVALVTGAAQGIGEAVVRALSARGATVAATDRSEQELKRSVARLSEDAGADPAAGPVVPYRLDVTAPDDVAETVERVSRELGPVDILVNVAGVLRTGPAVETTDRDWADVFAVNTTGVFHLSRAVVAGMAARGSGSVVTVASNAAGIPRADMSVYAASKAAAVAFTKCLGLEVAARGVRCNAVCPGSTDTPMQRSLWDGDSVPDGVLDGDLATHRTGIPLRRIAQPEDVAEAVVFLASDRARHITMQDLYVDGGATLR

SEQ ID NO: 92249 - protein, 328 aa, Streptomyces sp.
  REGION 1..328: note = tr|A0A5B7UNQ2|A0A5B7UNQ2_9ACTN 2,3-dihydro-2,3-dihydroxybenzoate dehydrogenase; OS = Streptomyces sp. YIM 121038 OX=2136401 GN=entA PE=4 SV=1
MTTTTAEQRRIGSGHGAWSTADDVLKGISLEGRTAIVTGGYSGLGLAATRALARAGARVLVPARRPRAATAALDGVPGTEVAALDLADLESVRAFADRVLDAGRAVDLLIAGAGVMACPETRVGPGWEAHFAVNHLGHYALVNRLAPALTPGRARVVAVASSGHFLSGVRWHDPHFHEGYDRWLAYAQSKTANALFALHLDRLAGPRGPRAFAVHPGSVLTPLQRHVPREEQLAQGWFGPDGTPAEGFKSPAQGAATAVWAATSPLLADHGGAYCQDCDVAEPATTDDMLIGGVKPWVRDPEAAARLWQLSAELTGVDHFARRAPSGR

SEQ ID NO: 92250 - protein, 264 aa, Streptomyces sp.
  REGION 1..264: note = tr|A0A399H3Y7|A0A399H3Y7_9ACTN 2,3-dihydro-2,3-dihydroxybenzoate dehydrogenase; OS = Streptomyces sp. YIM 130001 OX=2259644 GN=dhbA PE=4 SV=1
MTVDQELAGRFALVTGAGRGIGEAVVNALVERGARVLATDLDPAGVAALAVKHPTRVTARALDVTDADAVERLVDEAERELGALDIAVSVAGVLRGGPVTELSDDDWSATFAVNADGVFHLSRAAARRMSERGHGSIVTVASNAAGVPRSGMAAYAASKAAAVMFTKCLGLEVAARGVRCNTVSPGSTLTEMQRGMWAESGVDETEAARRIVAGDPESYRTGIPLGRIAGPEDIADAVAFLVSDRARHITLHDLYVDGGATLRA

SEQ ID NO: 92251 - protein, 261 aa, Streptomyces sp.
  REGION 1..261: note = tr|A0A2Z4JDH6|A0A2Z4JDH6_9ACTN 2,3-dihydro-2,3-dihydroxybenzoate dehydrogenase; OS = Streptomyces sp. ZFG47 OX=2184053 GN=DN051_33900 PE=4; SV = 1
MEDKEFGCRVALVTGAAGGIGSAVVRALAERGTTVAAVDKDPRRLTGLVEELAEDGLKAVAFPADVTDSVLVEEIVDRTENELGAVDLLVNAAGVIRSGSMLGMSDVDWRAVFSVNLDGVFHCSRAVAARMRERRAGTIVTISSNAARIPRMQMGAYGASKAAATLYTKSLGLELAEHGIRCNVVSPGSTETDMLRSLWSAENDRQVTIDGSPAAYRTGIPLRRIAEPQDIADAVLFLASDRARHITMQDLCVDGGAILGV

SEQ ID NO: 92252 - protein, 274 aa, Streptomyces spectabilis
  REGION 1..274: note = tr|A0A516R253|A0A516R253_STRST 2,3-dihydro-2,3-dihydroxybenzoate dehydrogenase; OS = Streptomyces spectabilis OX=68270 GN=FH965_03400 PE=4; SV = 1
MPDHIPGARAALADRTALVTGAGQGIGAAVAEALAAEGAHVLATDRTADGVKALAADWAADPARWGAGVEGTITAEAMDVTDAVSVEAVVAEAERTHGPLDILVNVAGILRPGPAAELTDADWADTFAVNTSGVLHTARAVTPRMAARGRGSVVTVGSNAAGVPRTGMAAYAASKAAAAMYTKCLGLELARSGVRCNVVAPGSTDTAMQRALWTDESAPQRVIDGDLATYRTGIPLGRIAEPGDIADAVVFLASDRARHITMQELYVDGGATLR

SEQ ID NO: 92253 - protein, 257 aa, Streptomyces turgidiscabies
  REGION 1..257: note = tr|L7FAX1|L7FAX1_9ACTN 2,3-dihydroxybenzoate-2,3-dehydrogenase OS=Streptomyces turgidiscabies Car8 OX=698760 GN=STRTUCAR8_03377 PE=3 SV=1
MTHGKIALVTGAAGGIGEAVLRTLAERGARVAAVDKDGDRLDEVVAKLSYDGLDVTAFPGDVTVSAEAERLVAEVEDTLGPLDHLVNGAGVLRLAKARELTDADWASTFAVNTTGVFFMSRAVVNRMVPRRSGAVVTIASNAAGTARMDMAAYSASKAAATMFTKCLGLEAAQYGIRCNVVAPGSTETPMLTSMWQDDHGRTATLEGAPDAYRVGIPLGKLARPADVAEAVAFLLSDRASHITMHDLTVDGGAALGV

SEQ ID NO: 92254 - protein, 256 aa, Streptomyces vinaceus
  REGION 1..256: note = tr|A0A5J6J7V1|A0A5J6J7V1_STRVI 2,3-dihydro-2,3-dihydroxybenzoate dehydrogenase; OS = Streptomyces vinaceus OX=1960 GN=CP980_14875 PE=4 SV=1
MENKVALVTGAAGGIGLAVARRLAEEGATVAAVDRDADRLRESVEKLVADGLDVHAHPADVTVTAQVEAVVDAVETELGPLDFLVNTAGILRLGEVRDFSDEDWLQTFEVNVSGVFRLSRAAVNRMIPRNRGAIVTVASNASGTPRTAMGAYGASKAAATMLTKTLGLEVAKHNIRCNIVAPGSTDTAMLASMWEDEQGPARTIAGSPESFKVGIPLGKLARTNDIAESVIFLLSDRAAHITLHVLTVDGGATLGA

SEQ ID NO: 92255 - protein, 256 aa, unidentified
  source 1..256: note = Streptosporangiaceae bacterium
  REGION 1..256: note = tr|A0A3A4B047|A0A3A4B047_9ACTN 2,3-dihydro-2,3-dihydroxybenzoate dehydrogenase; OS = Streptosporangiaceae bacterium YIM 75507 OX=2339229; GN = D5H75_21205 PE=4 SV=1
MEPGISGAHAFVTGAARGIGEAVARTLAGYGARLSLLDRDPGPLARLARELDTPSAHAADVSDARAVEKAVAEAEDRLGPIGILVNVAGVLHTGPVAEFGDEEWARTFAVNTGGVFHVSRAVVRRMIPRAAGVIVTVASNAAGVPRAEMAAYAASKAAATMFTKCLGLEVARYGIRCNVVAPGSTDTAMQRALWTDDRAAERVIAGVPEAYRTGIPLGRIAEPGDIADAVAFLASDRARHITMHDLYVDGGATLRA

SEQ ID NO: 92256 - protein, 334 aa, Syntrophorhabdus sp.
  REGION 1..334: note = tr|A0A1V5D4Q7|A0A1V5D4Q7_9DELT 2,3-dihydro-2,3-dihydroxybenzoate dehydrogenase; OS = Syntrophorhabdus sp. PtaU1.Bin153 OX=1811705 GN=entA; PE = 4 SV=1
MSTNQKPINSGFTSSSTTADVIQGIDLHGKTAIVTGGSSGLGRETVRTFLAAGARVIVPARDLERARRQLSEIKGVEVLKMDLLSPASVDAFANEFLARNEPLHILVNSAGIMACPFSKSSRGFESQFATNHLGHFQLVVQLWPALLKAKGARVVSVASKGHWFSPIVFEDPTFDHRPYDPWAAYGQSKTANILLVVELDKRGKDKNIRAFALHPGGIPGTGLEKYVPAEQIQAAGIIDKDGKPILDPEKDVKTVEQGAATQVWCATSPKLKDLGGVYCENVEVAPIVDESPRDDFGIDRSAKTRGVRPYAIDPINASRLWELSEKLLGIKADI

SEQ ID NO: 92257 - protein, 252 aa, Tatumella morbirosei
  REGION 1..252: note = tr|A0A095VUR7|A0A095VUR7_9GAMM 2,3-dihydroxybenzoate-2,3-dehydrogenase OS=Tatumella morbirosei OX=642227 GN=HA49_03620 PE=4 SV=1
MSQWPEFQGKQVWVTGAGQGIGYQTALAFHQAGAEVTGFDLKFDRQDYPFYCQVMNVADPKQVTEVCQDLLARQHRLDVLINAAGILRIGATDELSFDDWQQCLNVNAGGAFNLFQQTLPVFRRQQQGAIVTVASNAAHAPRLGMSAYGASKAALRSLCLTVGLEMAPHGVRCNIVSPGSTDTEMQRSLWKTPQSEQQTIDGFPEQFKLGIPLKKIAQPQEITNTILFLASAQASHVVLQDIVVDGGATLGA

SEQ ID NO: 92258 - protein, 252 aa, Tatumella ptyseos
  REGION 1..252: note = tr|A0A085JQA4|A0A085JQA4_9GAMM 2,3-dihydro-2,3-dihydroxybenzoate dehydrogenase; OS = Tatumella ptyseos ATCC 33301 OX=1005995 GN=entA PE=4; SV = 1
MTVQQDFHAKHVWVTGAGQGIGYHTALAFHQAGAIVTAFDIKFGEQEYPFHCQLLNVADPVQVKDVCQQLLSRQPQLDVLVNAAGILRIGATDELSFEDWQQCLNVNAGGAFNLFSQTLPHFRRQKHGAIVTVASNAAHAPRLGMSAYGASKAALRSLCLTVGLEMAPYGVRCNIVSPGSTDTEMQRSLWKTPQAEQQTIEGFPEQFKLGIPLKKIAKPQEIADTILFLASDRASHVVLQDIVVDGGATLGS

SEQ ID NO: 92259 - protein, 252 aa, Tatumella ptyseos; identical to SEQ ID NO: 92258
  REGION 1..252: note = tr|A0A2X5NG33|A0A2X5NG33_9GAMM 2,3-dihydro-2,3-dihydroxybenzoate dehydrogenase; OS = Tatumella ptyseos OX=82987 GN=entA PE=4 SV=1

SEQ ID NO: 92260 - protein, 255 aa, Teredinibacter turnerae
  REGION 1..255: note = tr|C5BUB9|C5BUB9_TERTT 2,3-dihydro-2,3-dihydroxybenzoate dehydrogenase; OS = Teredinibacter turnerae (strain ATCC 39867 / T7901); OX = 377629 GN=dhbA PE=4 SV=1
MNSLVEALNFSGKQVWITGAGRGIGYAIAESFYRAGAQVTGLDCAFPQHEYPFATVKCDLCKPEEIRACCQRLFVENGQIDVLVNAAGILRFAEITELTEDDWQASLDVNVSAVFHLIQQCIPRFKQQKSGVIVNIASNAARVPRMGMAAYCASKAALESFSHCIALELAAYGVRCNLVSPGSTNTPMLQNMLSNDAGFERTIQGSLATFKNGIPLRKIAHPNDIANSVLFLASDLASHITLHNLVVDGGATLSA

SEQ ID NO: 92261 - protein, 257 aa, Tetrasphaera japonica
  REGION 1..257: note = tr|A0A077LXB9|A0A077LXB9_9MICO 2,3-dihydro-2,3-dihydroxybenzoate dehydrogenase; OS = Tetrasphaera japonica T1-X7 OX=1194083 GN=dhbA PE=4 SV=1
MNDAASRVVVVTGAASGIGRAVALRLATDADTLVLLDRDGAGLAETAERAERAGASGTLPYAVDVSDGASVDEALGAAVDTVGPFDGLVSAAGTLEPGTLEEVTEDAWQRHLAVNATGVFHLLRTGAPRIRDGGAVVVVSSNAARVARAGMLAYAASKAAASALTRCAGLELAARGIRCNVVEPGSTDTPMLRALWPDPAIGAETAIEGDPQSHRLGIPLRRLAAPEDVADVVRFLLTDASRHVTLQQLFVDGGASL

SEQ ID NO: 92262 - protein, 250 aa, Thalassolituus sp.
  REGION 1..250: note = tr|A0A558NKC2|A0A558NKC2_9GAMM 2,3-dihydro-2,3-dihydroxybenzoate dehydrogenase; OS = Thalassolituus sp. C2-1 OX=2597518 GN=dhbA PE=4 SV=1
MAAFDFSGRHAWVTGAGQGIGWQVAQQLTALGADVTGFDLAFSQPPAAYAFRRQTLDLSRDGDVQACVADHLHHAVPDILINAAGILRLGGLDNLTMADWDACFAVNVRAVFSMIRALSPAMKEQRRGSIVTVSSNAAHVPRLNMAAYCASKAAVRSFAQCAALELAPFAVRCNLVSPGSTDTPMLRAMLPDGYQRTIGGLPEQYKLGIPLGKVATPADITNAVIFLASDLAGHITMHDLVVDGGATLAA

SEQ ID NO: 92263 - protein, 255 aa, Tomitella sp.
  REGION 1..255: note = tr|A0A516X5S8|A0A516X5S8_9ACTN 2,3-dihydro-2,3-dihydroxybenzoate dehydrogenase; OS = Tomitella sp. HY188 OX=2597660 GN=FO059_15115 PE=4 SV=1
MDAAEFAGRVAVVTGAASGIGAAVAAALTAHGAVVAALDLDGAAADAAVSAGGRGYACDVTDSAAVDAVVARIEAELGPVEMLANVAGVLATGDVVDTSDVQWSRPFAVNTTGVFTVSRAVARMMIPRGGGAIVTVGSNAAGVPRASMAAYGASKAAATMFTKCLGLELAEHGIRCNVVSPGSTDTPMQRGMWGDGRGAESVIGGTPEKFKVGIPLGRIADPADVADSVLFLLSDKARHITMHDLYVDGGATLKA

SEQ ID NO: 92264 - protein, 251 aa, Trabulsiella guamensis
  REGION 1..251: note = tr|A0A084ZZ18|A0A084ZZ18_9ENTR 2,3-dihydro-2,3-dihydroxybenzoate dehydrogenase; OS = Trabulsiella guamensis ATCC 49490 OX=1005994 GN=entA; PE = 4 SV=1
MSGFDFRDKTVWVTGAGKGIGYVAALAFADAGAMVTGFDLAFDGDHYPFTTEVLDVADAQQVAQVCRRLLERQSRLDVLVNAAGILRMGATDALSVADWQQTFAVNVGGAFNLFQQTMAQFRQQQGGAIVTVASDAAHTPRLGMSAYGASKAALKSLALTVGLELAASGVRCNLVSPGSTDTDMQRTLWLSDDAKQQRIRGFGEQFKLGIPLGKIARPQEIASTILFLASDHASHITLQDIVVDGGSTLGA

SEQ ID NO: 92265 - protein, 251 aa, Trabulsiella odontotermitis
  REGION 1..251: note = tr|A0A0L0GXA4|A0A0L0GXA4_9ENTR 2,3-dihydroxybenzoate-2,3-dehydrogenase OS=Trabulsiella odontotermitis OX=379893 GN=GM31_21270 PE=4 SV=1
MAGFDFHGKTVWVTGAGKGIGYATALAFVEAGADVTGFDLAFDGDHYPFAVEVLDVADAQQVALVCRRVLEQQPRLDVLVNAAGILRMGATDALSVADWQQTFAVNTGGAFNLFQQTMAQFRRQQGGAIVTVTSDAAHTPRLGMSAYGASKAALKSLALTVGLELAASGVRCNLVSPGSTDTDMQRTLWRSDDAEQQRIRGFGEQFKLGIPLGKIARPQEIASTILFLASDHASHITLQDIVVDGGSTLGA

SEQ ID NO: 92266 - protein, 256 aa, unidentified
  source 1..256: note = Trichormus variabilis
  REGION 1..256: note = tr|Q3M611|Q3M611_TRIV2 Short-chain dehydrogenase/reductase SDR OS=Trichormus variabilis (strain ATCC 29413 / PCC 7937) OX=240292 GN=Ava_3970 PE=4; SV = 1
MSFIDEINRANVLIVGASQGIGLGFVKKLLQDDRIAKIYATYRQKDSASELITLEKEYSPRLTCLSLDITDELQIAEILQQINTETNRLHLVINCVGILHEGNLQPEKSLRQLNSENLLRYFHINSIGAVLLAKHLLPCFQHNEPSVFASISAKLGSIGDNQLGGWYGYRASKAALNMFMRTVAVEYGRSCPKTTVVTLHPGTTDTRLSRPFQKNVAAEKLFSIERTVDQLLAVIAQLQKGDSGKFFSWDGTQLPW

SEQ ID NO: 92267 - protein, 245 aa, Tropicibacter naphthalenivorans
  REGION 1..245: note = tr|A0A0P1G2G6|A0A0P1G2G6_9RHOB 2,3-dihydro-2,3-dihydroxybenzoate dehydrogenase; OS = Tropicibacter naphthalenivorans OX=441103 GN=entA PE=3; SV = 1
MTQTIIITGAGRGIGKACAKVFLEAGWKVGLVGRQPGPLEEVAAGHKNALVLPGDVAQEMQVEQIFNRAAAEWGRIDALFNNAGVSVMGATIDEINVADWKRCMEVNVTGAFICARAAFKRMRAQDPQGGRIINNGSVSADVPRWGSAPYTASKHAVTGLTRSISLDGRPYNIACGQINIGNALTDMAEKMTQGVPQADGSIAIEPVMDVAHVANSVLHMANLPLDANVQFMTVMATNMPYIGRG

SEQ ID NO: 92268 - protein, 429 aa, unidentified
  source 1..429: note = Trypanosoma conorhini
  REGION 1..429: note = tr|A0A3R7RW10|A0A3R7RW10_9TRYP Putative short-chain dehydrogenase OS=Trypanosoma conorhini OX=83891; GN = Tco025E_05931 PE=4 SV=1
MIHYVSSEAFAALACLLFLALAAAAHFFQWSFWSSMTKVETLVAVVSCAFACRGVASGRPCKWPRGVDFTSRVALVTGASSGVGYGVAQELSLHGWTVIMAGRDLMRLLKAKRSLAAQNPPGRLVVLGEVDLADLDSVRSFAASVLEQREKFPVSLLVNAAGVLRRHLHRCEDTGMEEMIATNVVGPMLLTNLLLPLLEEAADRSGASSRIVNVASSCHTFLGASRRCGPAEMLAALHPQPPGEGAAAAAKAVPPALEDFTLGNFVRYYGLSKLCVIWWTSVLARRVSLRFFRHGDGNHLKVFVACCHPGIITTRLYRDLFSQRVLDRIIYYPSLLIGKTWREGAQAALRAGIETENMVHGGYYMCTGEYGPNSGINCLSKDAMNMEEANKFCAWAEAQIEAQKNRPRQPGQGKKVARPKRVMRVTFVT

SEQ ID NO: 92269 - protein, 428 aa, unidentified
  source 1..428: note = Trypanosoma rangeli
  REGION 1..428: note = tr|A0A3R7N7S2|A0A3R7N7S2_TRYRA Putative short-chain dehydrogenase OS=Trypanosoma rangeli OX=5698; GN = TraAM80_06897 PE=4 SV=1
MIHLFSSEALAALACLLFLAIAAVAQFFRWPFWSSMTTADTLLAIVSCAFACRGVASGRSCRWPSDMDFTSCVALVTGASSGVGYGVAQELSQHGWTVIMTGRNLMQLLKAKRSLMVQKPSGRLVVLGEVDLSDLDSVRSFAASVLEQKEKFPVSLLVNAAGVLRRHLHRCEDTGMEEMIATNVVGPMLLTNLLLPLLEEAAERSGVSSRIVNVASSCHTFLGVRQRGGPAEMLAALHPQPSEGATVAAKAGATAMKDFTLGNFVGYYGLSKLCVIWWTSVLARRVSRSFFRHGDGNQLKVFVACCHPGIITTHLYRDLFPQRVLDYIIYYPSLLIGKTWREGAQAVLRASIETDNMVHGGYYMCTGEYGPNSGINCLSKDAMNMDEAIKFCAWAEMQIEAQKNRPRQPGAGKKGATPKRIMGVKFVT

SEQ ID NO: 92270 - protein, 259 aa, Tsukamurella paurometabola
  REGION 1..259: note = tr|A0A3P8KSD7|A0A3P8KSD7_TSUPA 2,3-dihydro-2,3-dihydroxybenzoate dehydrogenase; OS = Tsukamurella paurometabola OX=2061 GN=entA_2 PE=4 SV=1
MELDLRDRAFVVSGAGSGIGLATALRLLREGARVCGFARDHDRLTAAFADVHAAPDRLLLMRGDARLPEDVEAVVDAAVRAFGGVHGVVANAGTGVAAGVDAAPGVWAEQFTTKVGAAMALVHAARPHLIAARGAIVLVNGVSAHHPASELAPVGAARAALANYAATLGTDLAPDGVRVVVVNVGVIETARQRERYERSGTTSTYADWCHEEARRRSIPLQRMGRPDEVGDTIAFLLSDRSSYTTGTSIDVSGGLDGRT

SEQ ID NO: 92271 - protein, 251 aa, unidentified; identical to SEQ ID NO: 91641
  source 1..251: note = Unknown
  REGION 1..251: note = tr|A0A212I5P2|A0A212I5P2_9ENTR 2,3-dihydro-2,3-dihydroxybenzoate dehydrogenase; OS = uncultured Citrobacter sp. OX=200446 GN=entA PE=4 SV=1

SEQ ID NO: 92272 - protein, 393 aa, unidentified
  source 1..393: note = Unknown
  REGION 1..393: note = tr|A0A1C6AZF7|A0A1C6AZF7_9CLOT 2,3-dihydro-2,3-dihydroxybenzoate dehydrogenase; OS = uncultured Clostridium sp. OX=59620 GN=entA PE=4 SV=1
MIDERLQDCRYALKGRKVLITGAGGGIGYEAAKAFLCMDAAVIIADISREKGSQAVQSLGALYPNSRMEFYEIDLADELQIRRMHSYLIQKYGFIDVVMHNAAVIYIGNVEEISSADWDKSYRVNFRAPLLLTQLFLPQMRSRNAGTIVFVPSSGAAPYMGAYEVFKTAQVELCNTLSGELEGTDVFTYSIGPGLVKTDTAMHGIEMVAQKMGLTTKEFYAMNGSHMLSAREAGCGFAVSVLHAEKYNGQEIGSIQALMDCGLLSVTDSGNSDKAGKAQTDPAMIHKIIQIYKEQYNGWMERNIFERQWVLRDFKKTVGISAGQFQSDMLQQEKELTAESENGFTVYRDHFEKLKRYYQRQYKLLQGYEKNPDKRKEHSDIILSWIRMLDEIL

SEQ ID NO: 92273 - protein, 261 aa, Variovorax sp.
  REGION 1..261: note = tr|A0A520E7X9|A0A520E7X9_9BURK 2,3-dihydro-2,3-dihydroxybenzoate dehydrogenase; OS = Variovorax sp. OX=1871043 GN=EOP81_03090 PE=4 SV=1
MSTPDTEFQGQHVLVTGAAGGIGAALARRLLQQGARVTALDADDAGLAALQTETDASRLLTRVVDVSDAAAVDAAVAEAEATLGPIDRLACVAGVLQMGRVIDLDDAQWSRTLAINAGGVFHTCRAVARRMVERRRGAIVNVSSNAATTPRAGMAAYAASKAAVTQLSRCLALELAEYGIRCNVVSPGSTDTEMQRAMWRQGSSREAVISGHAPSHRLGIPLGKIATPDDIVDSILFLLSDRAGHITLHDLRVDGGATLDQ

SEQ ID NO: 92274 - protein, 273 aa, unidentified
  source 1..273: note = Verrucomicrobia bacterium
  REGION 1..273: note = tr|A0A1V6E6V5|A0A1V6E6V5_9BACT 2,3-dihydro-2,3-dihydroxybenzoate dehydrogenase; OS = Verrucomicrobia bacterium ADurb.Bin122 OX=1852929; GN = entA PE=3 SV=1
MMSYQMLQSFRAVILTGGSSGIGKSFIEHVGKLHPALVFFNLSRRPPEIKVPGLILRHFDCDLSNRAQIEAVCGELVGEIDREIPAGRILLINNSGFGTYGPFPEPNLARQLEMLEVNLCAPVQLTARLLPTLRAHGGAIVNIASTSAFQPTGHMATYGASKAFLLHWSLALSEELRGSGVHVLAVCPGPTSTQFFRSAGLDRSVVPDSVGQTPEEVVETTLHALARRRTMVVSGWKNKLLAALSSRLPKPLAARIAIRVIAHYRGTGGKTNA

SEQ ID NO: 92275 - protein, 256 aa, Verrucosispora sp.
  REGION 1..256: note = tr|A0A372G6S3|A0A372G6S3_9ACTN 2,3-dihydro-2,3-dihydroxybenzoate dehydrogenase; OS = Verrucosispora sp. LHW63014 OX=2294034 GN=D0Q02_03080; PE = 4 SV=1
MTPDGIAGRTALVTGAARGIGAAVAAALSARGAHVALTDRDGPGARRRAEMLAGARGYPMDVTDADAVERTFAVVEEELGPIHICVSVAGILRPARVLDATDDDWRTTFDVNTTGVFHVLRCAGRRMAARNGGSIVVVSSNAAGVPRMGMAAYAASKAATSMLTKCLGLELAGHGVRCNVVAPGSTDTDMQRALSTGGGDTAVVAGSLPTFRTGIPLGRIADPTDVADAVLFLVSDQARHITMHDLYVDGGATLRA

SEQ ID NO: 92276 - protein, 253 aa, unidentified
  source 1..253: note = Verticiella sediminum
  REGION 1..253: note = tr|A0A556AZG5|A0A556AZG5_9BURK 2,3-dihydro-2,3-dihydroxybenzoate dehydrogenase; OS = Verticiella sediminum OX=1247510 GN=dhbA PE=4 SV=1
MQLTGFRNRIALVSGAGGGIGAAVVHALIEAGARVVATDLDWPQAAAVDGLTRLPLDVRDASAVDALVASVEEEIGPIRFGVSLAGVLTTGLATETSAADWRQTFAVNTDGVFHLTRALARRMGPRREGALVAVSSNAAGVPRYGMAAYAASKAATTMYMRSLGLELAPLGIRCNIVAPGSTRTPMQTGMWADASGEQRVIAGIPEQFKAGIPLGKIGEPEDVAAAVMFLLSDQASHVTMADLYVDGGATQRA

SEQ ID NO: 92277 - protein, 261 aa, Vibrio aerogenes
  REGION 1..261: note = tr|A0A1M6AKQ8|A0A1M6AKQ8_9VIBR 2,3-dihydro-2,3-dihydroxybenzoate dehydrogenase OS=Vibrio aerogenes CECT 7868 OX=1216006 GN=entA PE=4 SV=1
MSYDFSHSTILLTGAGGGIGFAVLKQLLRSKARVIATDISLSALQEKTKKLHHDYPGQLICREMDLAVHRATDEYISCWEAEYGPIHHLVSCAGLLHVHPLRTMPVSDIQDMFDVNVFGTLALMQAAGKKMAERQQGNMVIIGSNAANTPRAGIGAYAASKSALHMMVKCMGMELAPFGIRCNIVSPGSTRTHMQQQLWTENYGESQVIAGDAENFRLGIPLGKIAEPDDIAGTVLFLLSEAANHITLHDLRVDGGATLDQ

SEQ ID NO: 92278 - protein, 259 aa, Vibrio alginolyticus
  REGION 1..259: note = tr|A0A5D6X2X6|A0A5D6X2X6_VIBAL 2,3-dihydro-2,3-dihydroxybenzoate dehydrogenase OS=Vibrio alginolyticus OX=663 GN=EWT61_22850 PE=4 SV=1
MNSTFETVLLTGSGKGIGYAVLEHLLENGYRVVATDKDISLLNQSIEALRARFDESRLCCFELDLLKHDEVNDKVCQLDREFQFDHLVSCAGILHLGAVNDMSLDEIKQMFDVNTFGALALIQAISNSMKDRQQGNIVVIGSNSANTPRLNIGAYAATKSALHMLVKCVGLELAEKGIRCNLVSPGSTRTDMQTQLWNVNYGENEVIKGNLEQYRLGIPLGQMAEPEDIAKAVLFLMSDGAKQITMHDLRVDGGATLDN

SEQ ID NO: 92279 - protein, 258 aa, Vibrio anguillarum
  REGION 1..258: note = tr|A0A1Q1KXZ8|A0A1Q1KXZ8_VIBAN 2,3-dihydro-2,3-dihydroxybenzoate dehydrogenase OS=Vibrio anguillarum OX=55601 GN=CEJ46_05095 PE=4 SV=1
MMKLDETVLLTGAGQGIGYAVLESLLASGYRVVATDRNHHQLTQQLASLNARYTEQLHCYELDLQHHDDVKKRVQELNERYQFDHFISCAGILHLGSITELSMSEIKAMFDVNTFGTLAALQGVTIGMKVRQRGNVIVIGSNSANTPRLNIGAYAASKSALHMLVKCAALELANDGIRCNIVSPGSTRTEMQTQLWNSEYGEREVIKGNLEQYRLGIPLGKMAEPEDIAGVVMFLMSNAASQITMHDLRVDGGATLDN

SEQ ID NO: 92280 - protein, 261 aa, Vibrio atlanticus
  REGION 1..261: note = tr|A0A558GY10|A0A558GY10_9VIBR 2,3-dihydro-2,3-dihydroxybenzoate dehydrogenase OS=Vibrio atlanticus OX=693153 GN=FQP88_12795 PE=4 SV=1
MERFLEGQLVLLTGAAKGIGFSTLESLLDSGAKVLATDINSQLLATKSESLARKYPDQLWVEPLDLSKPELVKQSICHWVEEYGEFDHLVSCAGILHLGALCDMSFEQIENTFMVNSFGALATMQAVSKCMKARGKGNMVVVGSNAANTPRANMGAYAASKSALHMFVKSIGIELAPLGIRCNIVSPGSTRTEMQLQLWNESYGEEQVIAGDATQFRLGIPLNKIAEPKDIAQSILFLMSNAANHITMHDLRIDGGATLDN

SEQ ID NO: 92281 - protein, 263 aa, Vibrio campbellii
  REGION 1..263: note = tr|A0A1Q1PBM7|A0A1Q1PBM7_9VIBR 2,3-dihydro-2,3-dihydroxybenzoate dehydrogenase OS=Vibrio campbellii OX=680 GN=dhbA PE=4 SV=1
MSENRSEFNGKLCLVTGAGQGIGLACAKSLLAQGARVIACDVTQLALDAFQQSLPECQQSNTLLVPFDLADANAIQTACHNLEQDQLIPDYIVTCAGTLHLESVLDLPLEALNKTLDVNLKGTMLLTQQLAKILVKHSKQGAIVAVGSNAADTPRVKMSAYCTSKAGLHMWMQCLGLELAEHGIRCNIVSPGSTRTPMQEQMWNEAYGERETIQGNLASHRMGIPLNKIAETKDITNAIEFLLSDKSGHITMHDLRVDGGATF

SEQ ID NO: 92282 - protein, 255 aa, Vibrio celticus
  REGION 1..255: note = tr|A0A1C3JIC1|A0A1C3JIC1_9VIBR 2,3-dihydro-2,3-dihydroxybenzoate dehydrogenase OS=Vibrio celticus OX=446372 GN=dhbA PE=4 SV=1
MNFTKNGIAVVIGGTSGMGFETAKQLVAQNIHVLVVGNNPTKLDKAVSELQSLGHASGWQANLYDDASVSRLIAHLESLKEGIGYLVNAAGYFNPKAFIDHQETDYEQYMQLNKATFFITQAISKLMIQNGGGSVVNVGSMWAKQAIKATPSSAYSMAKAGLHALTQHMAMELAEHNIRVNAVSPAVVKTPIYESFIKPEEVDQALEGFNAFHPIGRVGLPKDIANSISFLLSDSADWVTGAIWDVDGGVIAGRN

SEQ ID NO: 92283 - protein, 262 aa, Vibrio cholerae
  REGION 1..262: note = tr|A0A0H3Q4H1|A0A0H3Q4H1_VIBCL 2,3-dihydro-2,3-dihydroxybenzoate dehydrogenase OS=Vibrio cholerae B33 OX=417400 GN=VCE_002123 PE=4 SV=1
MKDMSLVNSKVLLVGSARGIGFSVLEHLLQAGAQVMAADCEWQLLLEQSESLLGRYPDQLTLKKLDLAEPEAVREQVNQWAEQVAGFDHLVCCAGILHVAPLHEMPMEQVSSIFTVNAFGVLACMQGVASSMKARQQGSMVIIGSNAANTPRMSIGAYGASKAALHMLVKCIGMELAPYGIRCNLVSPGSTRTAMQQQLWTEQYGEAQVIAGDAAQFRLGIPLNKIAEPADIAQAVLFLLSDNAGHITLHDLRVDGGATLDH

SEQ ID NO: 92284 - protein, 262 aa, Vibrio cholerae; identical to SEQ ID NO: 92283
  REGION 1..262: note = tr|A0A4S3QP88|A0A4S3QP88_VIBCL 2,3-dihydro-2,3-dihydroxybenzoate dehydrogenase OS=Vibrio cholerae O1 biovar El Tor OX=686 GN=E5300_10860 PE=4 SV=1

SEQ ID NO: 92285 - protein, 239 aa, Vibrio cholerae
  REGION 1..239: note = tr|A0A0E4GMK0|A0A0E4GMK0_VIBCL 2,3-dihydro-2,3-dihydroxybenzoate dehydrogenase OS=Vibrio cholerae OX=666 PE=4 SV=1
MLEHLLQAGAQVMAADCEWQLLLEQSEPLLGSYPDQLTLKKLDLAEPEAVREQVNQWAEQVAGFDHLVCCAGILHVAPLHEMPLEQVSSIFTVNAFGVLACMQGVASSMKARQQGSMVIIGSNAANTPRMSIGAYGASKAALHMLVKCIGMELAPYGIRCNLVSPGSTRTAMQQQLWTEQYGEAQVIAGDAAQFRLGIPLNKIAEPADIAQAVLFLLSDKAGHITLHDLRVDGGATLDH

SEQ ID NO: 92286 - protein, 262 aa, Vibrio cholerae; identical to SEQ ID NO: 92283
  REGION 1..262: note = sp|Q56632|VIBA_VIBCH Vibriobactin-specific 2,3-dihydro-2,3-dihydroxybenzoate dehydrogenase OS=Vibrio cholerae serotype O1 (strain ATCC 39315 / El Tor Inaba N16961) O X=243277 GN=vibA PE=3 SV=1

SEQ ID NO: 92287 - protein, 262 aa, Vibrio fluvialis
  REGION 1..262: note = tr|A0A1L9L0I2|A0A1L9L0I2_VIBFL 2,3-dihydro-2,3-dihydroxybenzoate dehydrogenase OS=Vibrio fluvialis OX=676 GN=dhbA PE=4 SV=1
MFNQFLEKQTVFLTGAAKGIGFSVMLHLLEAGARVVATDIDEVRLKTDSDALKNRYREQLFCYHLDLSQPESVARRVAQMIEQHGQFDHLVCCAGVLHLGSIASMPLAQIEHTFNVNTFGTLAVMQALAEGMKARRSGSMVIVGSNAANTPRPNMGAYGASKAALHMLVKSMGMELAEYGVRCNIVSPGSTRTDMQMQLWSEEYGEPQVIAGNLEQFRLGIPLRKMAEPQDIARSVLFLLSEHAGHITLHDLRVDGGATLDN

SEQ ID NO: 92288 - protein, 263 aa, Vibrio harveyi
  REGION 1..263: note = tr|A0A2S0S3P1|A0A2S0S3P1_VIBHA 2,3-dihydro-2,3-dihydroxybenzoate dehydrogenase OS=Vibrio harveyi OX=669 GN=DS957_004295 PE=4 SV=1
MSENNTEFKSKLCLVTGAGQGIGLACAKSLLEQGATVIACDITQALLEEFKQSLPKKQQARTLLLPFDLANTTAVQYACHYLAQDKLIPDYVITCAGALHLGSVLELPPEALIKTLDVNLKGTMLLTQQLAKLLVQNNKKGAIVAVGSNAADTPRVNMSAYCSSKAGLHMWMQCLGLELAAYGIRCNIVSPGSTRTPMQEQMWNESYGERETIQGNLASHRIGIPLNKIAETKDITNAIEFLLSEKAGHITMHDLRVDGGATF

SEQ ID NO: 92289 - protein, 262 aa, Vibrio kanaloae
  REGION 1..262: note = tr|A0A0H3ZVR3|A0A0H3ZVR3_9VIBR 2,3-dihydro-2,3-dihydroxybenzoate dehydrogenase OS=Vibrio kanaloae OX=170673 PE=4 SV=1
MEITMSLDNQKVLLVGAATGIGLSTLESLLRAGARVIVADHKLKLLEKNTQALAKEYPKQFECHWLDLADQVKVLESVDAWQQQGLFNHLVCCAGMLHVGPLHELPMSTIKQTFDVNTFGVLALMQAIAKTMKTRGSGSMVIVGSNAANTPRQSIGAYGASKSALHMMVKCMGIELAPFGIRCNIVSPGSTDTPMQRQLWTESYGEKEVIEGDINQFRLGIPLAKLAQPEDIANAILFLLSKAASHITMHDLRVDGGATLDN

SEQ ID NO: 92290 - protein, 252 aa, Vibrio mangrovi
  REGION 1..252: note = tr|A0A1Y6IUD1|A0A1Y6IUD1_9VIBR 2,3-dihydro-2,3-dihydroxybenzoate dehydrogenase OS=Vibrio mangrovi OX=474394 GN=entA PE=4 SV=1
MSQEQEFTGQNVWVTGAGQGIGAAVAKAFSCAGATVFGLDKTFAADDYPYRCITVDLAQSHEVTDCCHTLLENCSGLDVLVNCAGILRMGATDELSHKDWQDTFAVNVGAAFHLFQQAIPVFKQQHSGAIVTIASNAAQTPRIGMSAYGASKAALRSLTMTVGLELAEYGVRANLVSPGSTDTQMQRSLWNTADAEQQTIQGFPQQYKLGIPLRKIATPAEIAQSVLFLASKRASHITMQDLVIDGGATLGR

SEQ ID NO: 92291 - protein, 257 aa, Vibrio metschnikovii
  REGION 1..257: note = tr|A0A380Q1H8|A0A380Q1H8_VIBME 2,3-dihydroxybenzoate-2,3-dehydrogenase OS=Vibrio metschnikovii OX=28172 GN=dhbA PE=4 SV=1
MNQNNQTVLLTGSSQGIGYAVLERLLIEGYRVVATDRCIDKLDEHLASLQRQYADQLDCYAIDLLDSQLDQKVAQLCRQYRFDHLVSCAGILSIGSVSSMPIEEIRKMFEVNTFAAMSIIQNVAKGMKQRKSGNIVVIGSNSANTPRMNIGGYAASKSALHLLVKCCALELAEFGIRCNIVSPGSTRTEMQTQLWNESYGEQQVIEGNLAQYRLGIPLGRMAEPADIANTVLFLMSDSARQITMHDLRVDGGATLDN

SEQ ID NO: 92292 - protein, 261 aa, Vibrio nigripulchritudo
  REGION 1..261: note = tr|U4E159|U4E159_9VIBR 2,3-dihydro-2,3-dihydroxybenzoate dehydrogenase OS=Vibrio nigripulchritudo FTn2 OX=1238441 GN=dhbA PE=4 SV=1
MPNFLDAQHVLLTGAAKGIGFSTLESLLDAGAKVLATDIDEKLLAKKSDFLSTQFPGQLRIAKLDLSQPEYVKERIHGWIEEYGEFDHLVSCAGILHLGALSDMPFEQVEHTFMVNSFGVLAAMQAVSISMKQHGKGNIVVVGSNAANTPRANMGAYAASKSALHMFVKSIGIELAPLGIRCNIVSPGSTRTEMQLQLWNENYGEEQVIAGNAEQFRLGIPLKKIAEPEDIAKTILFLMSEGANHITMHDLRVDGGATLDN

SEQ ID NO: 92293 - protein, 261 aa, Vibrio nigripulchritudo; identical to SEQ ID NO: 92292
  REGION 1..261: note = tr|U4KGJ2|U4KGJ2_9VIBR 2,3-dihydro-2,3-dihydroxybenzoate dehydrogenase OS=Vibrio nigripulchritudo OX=28173 GN=dhbA PE=4 SV=1

SEQ ID NO: 92294 - protein, 263 aa, Vibrio owensii
  REGION 1..263: note = tr|A0A3G2PVZ4|A0A3G2PVZ4_9VIBR 2,3-dihydro-2,3-dihydroxybenzoate dehydrogenase OS=Vibrio owensii OX=696485 GN=D0812_08590 PE=4 SV=1
MSENRSEFDSKLCLVTGAGQGIGLACAKSLLAQNARVIACDVTQKALDALQQSLPSDQQQRAILLPFDLADSTAIQSACRKLEQDQLIPDYIVTCAGTLHLESVLDLPLEALNKTMDVNLKGTMLLTQQLAKMLVKHSKQGAIVAVGSNAADTPRVKMSAYCTSKAGLHMWMQCLGLELAEHGIRCNIVSPGSTRTPMQEQMWNESYGERETIQGNLASHRIGIPLNKIAETKDITNAIEFLLSDKSGHITMHDLRVDGGATF

SEQ ID NO: 92295 - protein, 261 aa, unidentified
  source 1..261: note = Vibrio palustris
  REGION 1..261: note = tr|A0A1R4B879|A0A1R4B879_9VIBR 2,3-dihydro-2,3-dihydroxybenzoate dehydrogenase OS=Vibrio palustris OX=1918946 GN=entA PE=4 SV=1
MTIDLSNQQVLLTGASQGIGLATLKQLLRCGARVLATDRDLSELHGATQQLQETHPKTLHIRELDLINCEDIMAEVPRWIDSFGTIDQLIHCAGILNLNPILTAPTSTITETFSVNVFGATTLLQQIGQHMKSHGNGNIVVIGSNAANTPRANMGAYAASKAALHMLVKCFGMELAESGIRCNIVSPGSTRTAMQMQLWNENYGEQQVIDGDAKHYRLGIPLKKIAEPDDIVQTILFLMSDAANHITLHDLRVDGGATLDN

SEQ ID NO: 92296 - protein, 251 aa, Vibrio parahaemolyticus
  REGION 1..251: note = tr|A0A0M3E4Y7|A0A0M3E4Y7_VIBPH 2,3-dihydroxybenzoate-2,3-dehydrogenase OS=Vibrio parahaemolyticus OX=670 GN=AAY51_20080 PE=4 SV=1
MAGFDFHGKTVWVTGAGKGIGYATALAFVEAGAQVTGFDREFTLQDYPFVTEVMDVADAGQVAEVCQRLLVQTDRLDVLVNAAGILRMGATDALSPRDWQQTFAVNVGGAFNLFQQTMAQFRHQRGGAIVTVASDAAHTPRIGMSAYGASKAALKSLALTVGLELAGSGVRCNLVSPGSTDTDMQRTLWVSDDAEQQRIRGFGEQFKLGIPLGKIARPQEIANTILFLASDLASHITLQDIVVDGGSTLGA

SEQ ID NO: 92297 - protein, 258 aa, Vibrio pectenicida
  REGION 1..258: note = tr|A0A427U1F9|A0A427U1F9_9VIBR 2,3-dihydro-2,3-dihydroxybenzoate dehydrogenase OS=Vibrio pectenicida OX=62763 GN=EJA03_13720 PE=4 SV=1
MSLDNKKVLLVGAATGIGLSVLESLLREGAIVTVADKQIDLLIKNTQFLLKMYSNKFECHWLDLAEHTQVAEIVEAWQQQGTFDHLVCCVGLLHVGSLHELPIAAVKHTFDVNTFGVLALMQTVAKSMKFKGLGSMVIVGSNAANTPRQSIGAYGASKAALHMMVKCMGIELSPFGIRCNIVSPGSTDTPMQRQLWTESYGESEVIAGDLSQFRLGIPLAKLAQPQDIANAILFLLSDAAGHITMHDLRVDGGATLDN

SEQ ID NO: 92298 - protein, 261 aa, Vibrio penaeicida
  REGION 1..261: note = tr|A0A432DFB5|A0A432DFB5_9VIBR 2,3-dihydro-2,3-dihydroxybenzoate dehydrogenase OS=Vibrio penaeicida OX=104609 GN=EKN09_07055 PE=4 SV=1
MSKFLERNHVLLTGAAKGIGFSTLENLLEAGAKVIATDIDVELLASKSDSLSTQYPDQLQVFKLDLSKPERVKESIHQWINDYGEFDHLVSCAGILHLGALCDMALEQIENTFMVNTFGVLSTMQAVSASMKTRRKGNIVVVGSNAANTPRANMGAYAASKSALHTFVKSVGIELAPLGIRCNIVSPGSTRTEMQLQLWNDDYGEEQVIAGDAKQFRLGIPLNKIAEPNDIAQTILFLMSDAANHITMHDLRVDGGATLDN

SEQ ID NO: 92299 - protein, 261 aa, unidentified
  source 1..261: note = Vibrio quintilis
  REGION 1..261: note = tr|A0A1M7YX48|A0A1M7YX48_9VIBR 2,3-dihydro-2,3-dihydroxybenzoate dehydrogenase OS=Vibrio quintilis OX=1117707 GN=entA PE=4 SV=1
MSDNLNHKTILLTGAGGGIGFAVLKQLLHNNARVISTDISLSALKEKNQSLLKDYPNQLICHELNLAHHAEINGQIAHWDSEYGPIDHLISCAGLLHVHPLTTMPVSNIQEIFEVNVYGTVALMQAIGKKMAERRHGNMVIIGSNAANTPRAGIGAYAASKSALHMMVKCMGMELAPHGIRCNIVSPGSTRTEMQAQLWTENYGESEVIAGNAEHFRLGIPLGKIAEPDDIAGTVLFLLSDAANHITLHDLRVDGGATLDH

SEQ ID NO: 92300 - protein, 305 aa, Vibrio ruber
  REGION 1..305: note = tr|A0A1R4LTS2|A0A1R4LTS2_9VIBR 2,3-dihydro-2,3-dihydroxybenzoate dehydrogenase OS=Vibrio ruber DSM 16370 OX=1123498 GN=entA PE=4 SV=1
MTNICHLFHTQYIGKIISENNYQFQMIIHLICGIIIVIVANIKTGEVGLNQNHQTVLLTGASQGIGYTVLERLLVEGYKVVATDRCIDALDTKLDAVKKQYAAQLDYYAIDLLDSQLAQQVAQLCSKYHFDHLVSCAGALSSGSVHEMSVETIKQMFDINTFGALTMIQQVAEGMKRRKAGNIVVIGSNAANTPRLNIGAYAASKSALHMLVKCSGLELAEYGIRCNIISPGSTRTEMQTQLWHENYGEPQVIAGNLEQYRLGIPLRKMAEPADIANSVLFLMSDAARQITMHDLRVDGGATLDN

SEQ ID NO: 92301 - protein, 275 aa, Vibrio sp.
  REGION 1..275: note = tr|A0A0H3ZW35|A0A0H3ZW35_9VIBR 2,3-dihydro-2,3-dihydroxybenzoate dehydrogenase OS=Vibrio sp. 1S_269 OX=1652828 PE=4 SV=1
MKSSQISAMGGVKMEITMSLDNQKVLLVGAATGIGLSTLESLLRAGARVIVADHKLKLLEKNTQALAKEYPKQFECHWLDLADQVKVLESVDAWQQQGLFNHLVCCAGMLHVGPLHELPMSTIKQTFDVNTFGVLALMQAIAKTMKTRGSGSMVIVGSNAANTPRQSIGAYGASKSALHMMVKCMGIELAPFGIRCNIVSPGSTDTPMQRQLWTESYGEKEVIEGDINQFRLGIPLAKLAQPEDIANAILFLLSKAASHITMHDLRVDGGATLDN

SEQ ID NO: 92302 - protein, 263 aa, Vibrio sp.
  REGION 1..263: note = tr|K5UQH7|K5UQH7_9VIBR 2,3-dihydro-2,3-dihydroxybenzoate dehydrogenase OS=Vibrio sp. HENC-03 OX=992012 GN=dhbA PE=4 SV=1
MSENRSEFDSKLCLVTGAGQGIGLACAKSLLAQNARVIACDVTQKALDALQQSLPSDQQQRATLLPFDLADSTAIQNACRKLEQDQLIPDYIVTCAGTLHLESVLDLPLESLNKTLDVNLKGTMLLTQQLAKMLVKHGKQGAIVAVGSNAADTPRVKMSAYCTSKAGLHMWMQCLGLELAEHGIRCNIVSPGSTRTPMQEQMWNESYGERETIQGNLASHRIGIPLNKIAETKDITNAIEFLLSDKSGHITMHDLRVDGGATF

SEQ ID NO: 92303 - protein, 261 aa, Vibrio sp.
  REGION 1..261: note = tr|A0A3N9TCS5|A0A3N9TCS5_9VIBR 2,3-dihydro-2,3-dihydroxybenzoate dehydrogenase OS=Vibrio sp. LJC006 OX=2487322 GN=EES38_19275 PE=4 SV=1
MTIDLSNQQILLTGASQGIGLATLKQLLGCGASVIATDRDISLLKDATHELQLTSPEKLRLKELDLMRCDHIVSEVPDWIEEVGKIDQLVHCAGILHLNPILTAPTSTITDTFSVNVFGATTLLQQLGQHMKAQRKGNIVVIGSNAANTPRANMGAYAASKAALHMLVKCFGMELSEFGIRCNIVSPGSTRTSMQMQLWNEHYGEQQVIEGNAEQYRLGIPLKKIAEPEDIVQTILFLMSDAANHITLHDLRVDGGATLDN

SEQ ID NO: 92304 - protein, 257 aa, unidentified
  source 1..257: note = Vibrio spartinae
  REGION 1..257: note = tr|A0A1N6M7L6|A0A1N6M7L6_9VIBR 2,3-dihydro-2,3-dihydroxybenzoate dehydrogenase OS=Vibrio spartinae OX=1918945 GN=dhbA PE=4 SV=1
MKQNNETVLLTGASQGIGYAVLERLLAEGYKVVATDRCMDALESKLGDFKRAYGEQLDWYAIDLLDRQLAQQVAQLCREYHFDHFVSCAGVLSIGNVHAMAAEDIRQMFDINTFGALTMIQHVAEGMKHRQSGSIVVIGSNSANTPRLNIGAYAASKSALQMLVKCTALELAEYGIRCNIVSPGSTRTEMQTQLWHDNYGEQQVIEGNLEQYRLGIPLKTMAEPVDIANAVLFLMSDSARQITMHDLRVDGGATLDN

SEQ ID NO: 92305 - protein, 261 aa, Vibrio tapetis
  REGION 1..261: note = tr|A0A2N8ZM52|A0A2N8ZM52_9VIBR 2,3-dihydro-2,3-dihydroxybenzoate dehydrogenase OS=Vibrio tapetis subsp. tapetis OX=1671868 GN=entA PE=4 SV=1
MMDAEKPRTLTLITGAASGIGKACAKAVLTQDEEVILLDKDNEQLLAFYESLTAKQQDKAHLYSVDLNDLTSVSNFCQSISEKGLTPNNIISAAGILHLSPILELSAEQLTDTLNTNFIGTFVLLQHLAKTWVTNHYPGSLVVVGSNAADTPRVNMSAYCASKASLHIAIKCMGLELAQYGIRCNIVSPGSTRTSMQEQLWQNADGEQLTIQGNLEQHKLGIPLGKIAEPDDIVNAVLFLLSEKAGHITMQDLRVDGGATL

SEQ ID NO: 92306 - protein, 261 aa, Vibrio tasmaniensis
  REGION 1..261: note = tr|A0A2N7NPE0|A0A2N7NPE0_9VIBR 2,3-dihydro-2,3-dihydroxybenzoate dehydrogenase OS=Vibrio tasmaniensis OX=212663 GN=BCS92_01430 PE=4 SV=1
MERFLEGQLVLLTGGAKGIGFSTLESLLDSGAKVLATDIDSQLLATKSESLARKYPDQLWVEPLDLSKPELVKQSIYHWVAEYGEFDHLVSCAGILHLGALCDMSFEQIENTFMVNSFGALATMQAVSKCMKDRGKGNMVVVGSNAANTPRANMGAYAASKSALHMFVKSIGIELAPLGIRCNIVSPGSTRTEMQLQLWNESYGEEQVIAGDATQFRLGIPLNKIAEPKDIAQSILFLMSNAANHITMHDLRIDGGATLDN

SEQ ID NO: 92307 - protein, 262 aa, Vibrio vulnificus
  REGION 1..262: note = tr|A0A3Q0KYY2|A0A3Q0KYY2_VIBVU 2,3-dihydro-2,3-dihydroxybenzoate dehydrogenase OS=Vibrio vulnificus (strain CMCP6) OX=216895 GN=VV2_0834 PE=4 SV=1
MFNQFLEKQTVFLTGAAKGIGFSVMQHLLEAGARVVATDIDEVRLKTDSDALKNRYREQLFCYHLDLSQPESVARRVAQMIEQHGQFDHLVCCAGVLHLGSITSMPLAQIEHTFNVNTFGTLAVMQALAEGMKARRSGSMVIVGSNAANTPRPNMGAYGASKAALHMLVKSMGMELAEYGVRCNIVSPGSTRTDMQMQLWSEEYGEPQVIAGNLEQFRLGIPLRKMAEPQDIARSVLFLLSEHAGHITLHDLRVDGGATLDN

SEQ ID NO: 92308 - protein, 262 aa, Vibrio vulnificus
  REGION 1..262: note = tr|A0A4Q7IB86|A0A4Q7IB86_VIBVL 2,3-dihydro-2,3-dihydroxybenzoate dehydrogenase OS=Vibrio vulnificus OX=672 GN=D8T65_12985 PE=4 SV=1
MFDQFLEKQTVFLTGAAKGIGFSVMQHLLDAGARVVATDIDEVRLKADSDALMNRYREQLFCYHLDLSQPESVARRVAQMVEQHGPFDHLVCCAGVLHLGAIASMPLAQIEHTFNVNTFGTLAVMQVLAEGMKARRAGSMVIVGSNAANTPRPNMGAYGASKAALHMLVKSMGIELAEYGVRCNIVSPGSTRTDMQMQLWSEEYGEPQVIAGNLEQFRLGIPLRKMAEPQDIARSVLFLLSDHAGHITLHDLRVDGGATLDN

SEQ ID NO: 92309 - protein, 247 aa, Xenorhabdus bovienii
  REGION 1..247: note = tr|D3V7C5|D3V7C5_XENBS 2,3-dihydro-2,3-dihydroxybenzoate dehydrogenase; OS = Xenorhabdus bovienii (strain SS-2004) OX=406818 GN=entA; PE = 4 SV=1
MNSFKGKTVWVTGAGSGIGYRTALRFHEAGAKVFGFDLKFPDSMPFETLILDVSDDCAVQKICPPLLKENGLDILVNGAGILRLGSAETLSREDWESSINVNAGAAFNLFKILIPHFQRQRSGNIVSIASNAAHVPRVNMAVYCASKAAMRSLCLSVGLELAPFGIRCNIVSPGSTLTPMLEGMFDDDIAHQRLIHGVTEQFKLGIPLGKIAHPDEIASVILFLASEQASHMTLQDIVIDGGATLGA

SEQ ID NO: 92310 - protein, 252 aa, Xenorhabdus bovienii
  REGION 1..252: note = tr|A0A0B6X9A2|A0A0B6X9A2_XENBV 2,3-dihydro-2,3-dihydroxybenzoate dehydrogenase implied in enterobactin synthesis OS=Xenorhabdus bovienii OX=40576; GN = entA PE=4 SV=1
MSTVFDFSGKNVWITGAGRGIGYQIASRFSQAGANVTGFDVAFPDAEIPFTSYVLDISDHLAVSHCCRKLLTPETHLDVLVNGAGILRTGHTETLSWEDWQQCLNVNAGGAFNFFQAVIPQFQRQCSGNIVSICSNAAHVPRVEMSAYGASKAALRSLCLSVGLELAPYGVRCNLVSPGSTDTPMLQSMWQTLASRQHTIDGSPEKFKLGIPLKKIALPNEIADTVLFLASDLASHITLQDIVIDGGATLGA

SEQ ID NO: 92311 - protein, 252 aa, Xenorhabdus bovienii
  REGION 1..252: note = tr|A0A077N168|A0A077N168_XENBV 2,3-dihydro-2,3-dihydroxybenzoate dehydrogenase; OS = Xenorhabdus bovienii str. feltiae Florida OX=1397852; GN = entA PE=4 SV=1
MSIVFDFSGKNVWITGAGRGIGYQIASRFSQAGANVTGFDVAFPDSEIPFTSYVLDISDHLAVSRCCRELLTPETHLDVLVNGAGILRTGSTELLSWEDWQQCLNVNAGGAFNFFQAVIPQFQRQRSGNIISICSNAAHVPRVEMSAYGASKAALRSLCLSVGLELAPYGVRCNLVSPGSTDTPMLQSMWQTLASRQHTIDGSPEKFKLGIPLKKIALPNEIADTVLFLASDLASHITLQDIVIDGGATLGA

SEQ ID NO: 92312 - protein, 252 aa, Xenorhabdus bovienii
  REGION 1..252: note = tr|A0A077NXV5|A0A077NXV5_XENBV 2,3-dihydro-2,3-dihydroxybenzoate dehydrogenase; OS = Xenorhabdus bovienii str. feltiae Moldova OX=1398200; GN = entA PE=4 SV=1
MSIVFDFSGKNVWITGAGRGIGYQIASRFSQAGANVTGFDVAFPDAEIPFTSYVLDISDHLAVSHCCRKLLTPETHLDVLVNGAGILRTGHTETLSWEDWQQCLNVNAGGAFNFFQAVIPQFQRQCSGNIVSICSNAAHVPRVEMSAYGASKAALRSLCLSVGLELAPYGVRCNLVSPGSTDTPMLQSMWQTLASRQHTIDGSPEKFKLGIPLKKIALPNEIADTVLFLASDLASHITLQDIVIDGGATLGA

SEQ ID NO: 92313 - protein, 252 aa, Xenorhabdus bovienii
  REGION 1..252: note = tr|A0A077QGB2|A0A077QGB2_XENBV 2,3-dihydro-2,3-dihydroxybenzoate dehydrogenase; OS = Xenorhabdus bovienii str. Intermedium OX=1379677; GN = entA PE=4 SV=1
MSTAFDFSGKNVWITGAGRGIGYQIASRFSQAGANVMGFDVAFPDAEIPFTSYVLDISDHLAVSRCCRELLTPETHLDVLVNGAGILRTGHTETLSWEDWQQCLNVNAGGAFNFFQAVIPQFQRQRSGNIVSICSNAAHVPRVEMSAYGASKAALRSLCLSVGLELAPYGVRCNLVSPGSTDTPMLQSMWQTPASRQHTIEGSPEKFKLGIPLKKIALPDEIADTVLFLASDLASHITLQDIVIDGGATLGA

SEQ ID NO: 92314 - protein, 261 aa, Xenorhabdus bovienii
  REGION 1..261: note = tr|A0A077Q2S4|A0A077Q2S4_XENBV 2,3-dihydro-2,3-dihydroxybenzoate dehydrogenase; OS = Xenorhabdus bovienii str. kraussei Becker Underwood; OX = 1398204 GN=entA PE=3 SV=1
MTFDENYIAIITGACGGIGEATANQLAAQGLTLALIDNQAEALQVLVDKLNKKYSQPIAAFPANVADPQQIEEVFLAITNQLGAIGYLVNGAGILHHGTVEDTDIDVWNHTFSVNTTGVFNVSKAAAKHMVEQKKGSIVTIASNASRVPRATMSAYCASKAAAQAFTYALGLEVAPYGIRCNVVSPGSTDTPMLRGMWQNENDKNHTLKGNPEQFRTGIPLHKIATPEEIAAAVCFYLSEESGQTTLSTLLVDGGAALGNC

SEQ ID NO: 92315 - protein, 252 aa, Xenorhabdus bovienii
  REGION 1..252: note = tr|A0A077P224|A0A077P224_XENBV 2,3-dihydro-2,3-dihydroxybenzoate dehydrogenase; OS = Xenorhabdus bovienii str. kraussei Quebec OX=1398203; GN = entA PE=4 SV=1
MSTAFDFSGKNVWITGAGRGIGYQIASRFSQAGANVTGFDVAFPDAEIPFTSYVLDISDHLAVSRCCRELLTPETHLDVLVNGAGILRTGHTETLSWEDWQQCLNVNAGGAFNFFQAVIPQFQRQRSGNIVSICSNAAHVPRVEMSAYGASKAALRSLCLSVGLELAPYGVRCNLVSPGSTDTPMLQSMWQTPASRPHTIDGFPEKFKLGIPLKKIALPDEIADTVLFLASDLASHITLQDIVIDGGATLGA

SEQ ID NO: 92316 - protein, 212 aa, Xenorhabdus bovienii
  REGION 1..212: note = tr|A0A077P1J2|A0A077P1J2_XENBV 2,3-dihydro-2,3-dihydroxybenzoate dehydrogenase; OS = Xenorhabdus bovienii str. oregonense OX=1398202 GN=entA; PE = 4 SV=1
MAFPDTEIPFTSYVLDISDHLAVSRCCRELLTPETHLDVLVNGAGILRTGHTETLSWEDWQQCLNVNAGGAFNFFQAVIPQFQRQWSGNIVSICSNAAHVPRVEMSAYGASKAALRSLCLSVGLELAPYGVRCNLVSPGSTDTPMLQSMWQTPASRQYTIEGFPEKFKLGIPLKKIALPDEIAGTVLFLASDLASHITLQDIVIDGGSTLGA

SEQ ID NO: 92317 - protein, 252 aa, Xenorhabdus bovienii; identical to SEQ ID NO: 92311
  REGION 1..252: note = tr|A0A077NNT7|A0A077NNT7_XENBV 2,3-dihydro-2,3-dihydroxybenzoate dehydrogenase; OS = Xenorhabdus bovienii str. puntauvense OX=1398201; GN = entA PE=4 SV=1

SEQ ID NO: 92318 - protein, 252 aa, Xenorhabdus cabanillasii
  REGION 1..252: note = tr|W1J5G0|W1J5G0_9GAMM 2,3-dihydro-2,3-dihydroxybenzoate dehydrogenase; OS = Xenorhabdus cabanillasii JM26 OX=1427517 GN=entA PE=4; SV = 1
MNIAFDFSNKHVWVTGAGSGIGYHIASRFSQAGAKVIGFDLAFPDSELPFTTYKLDISNHIAVSQLCRELLAAEPNLDILINSAGILRTGRTESLSWEDWQQCFNVNAGGAFNLFQAVIPQFLRQRSGNIVSICSNAAHVPRVEMSAYCASKAAMRSLCQSVGLELAPYGVRCNLVSPGSTDTSMLQNIWQGTTTRQNIIDGFPDKFKLGIPLKKIALPEEITDTVFFLASDLASHITLQDIVVDGGATLGC

SEQ ID NO: 92319 - protein, 261 aa, Xenorhabdus doucetiae
  REGION 1..261: note = tr|A0A068QSZ4|A0A068QSZ4_9GAMM 2,3-dihydro-2,3-dihydroxybenzoate dehydrogenase; OS = Xenorhabdus doucetiae OX=351671 GN=dhbA PE=3 SV=1
MTFDKHYIAVITGACGGIGEAVARLLAKEGISLALLDNKSQALESLVVELKDEYTQPIMGFTVDVADAQCVEKAFATLSCQLGPVGYLVNGAAVLCHSFVTETSLQDWEKTFAVNATGVFNVSRHAANVMMKQRKGSIVTIASNAARVPRATMAAYCASKAAAQAFTYALGLEVAPYGIRCNVVAPGSTDTPMLRSMWQNERDRQNTLKGNLQQFRIGIPLNKIATVKEIATAVCFYLCEESGQTTLSTLLVDGGAALGSC

SEQ ID NO: 92320 - protein, 257 aa, unidentified
  source 1..257: note = Xenorhabdus khoisanae
  REGION 1..257: note = tr|A0A0J5FR95|A0A0J5FR95_9GAMM 2,3-dihydroxybenzoate-2,3-dehydrogenase OS=Xenorhabdus khoisanae OX=880157 GN=AB204_13175 PE=4 SV=1
MNMTFDFSGKQVWVTGAGRGIGYHIASRFSQVGAKVIGLDLAFPDSDLPFTAYQLDVSDPVAVSQLCRKLLKAEPHLDILVNGAGILRTGSTETLSWEDWQQCFNVNAGGAFNLFQAVIPQFQRQRSGNIVSVCSNAAHVPRIGMSAYGASKAAMRSLCQSVGLELAPYGVRCNLVSPGSTDTPMLQSMWQNDLQQGAVFRRNIVKGFPDTFKLGIPLKKIALPEEIADTVLFLASDLASHITMQDIVVDGGATLGS

SEQ ID NO: 92321 - protein, 261 aa, Xenorhabdus nematophila
  REGION 1..261: note = tr|N1NKJ4|N1NKJ4_XENNE 2,3-dihydro-2,3-dihydroxybenzoate dehydrogenase; OS = Xenorhabdus nematophila F1 OX=1306162 GN=dhbA PE=3 SV=1
MTFDKKYVAVIIGACGGIGEAIARQLAMEGITLALIDKQADALQFLVTRLSHEYSQSITSFPVDVAEPQQVVSAFLAIRNQLGPIGYLVNSAGVLHHDSVENTDIDAWNRIFAINATGVFNVSKAAASYMTEQKKGSIVTVASNAARVPRAMMAAYCASKAAAQAFTYALGLEVAPFGIRCNVVAPGSTDTPMLRSMWKNENDKSLTLDGNPEQFRIGIPLRKIATSDEIATAVCFYLSEESSQTTLSTLLVDGGAALGSC

SEQ ID NO: 92322 - protein, 261 aa, Xenorhabdus nematophila; identical to SEQ ID NO: 92321
  REGION 1..261: note = tr|A0A0A8P2M6|A0A0A8P2M6_XENNE 2,3-dihydro-2,3-dihydroxybenzoate dehydrogenase; OS = Xenorhabdus nematophila str. Websteri OX=1437826; GN = dhbA PE=3 SV=1

SEQ ID NO: 92323 - protein, 247 aa, Xenorhabdus poinarii
  REGION 1..247: note = tr|A0A068R149|A0A068R149_9GAMM 2,3-dihydro-2,3-dihydroxybenzoate dehydrogenase; OS = Xenorhabdus poinarii G6 OX=1354304 GN=entA PE=4 SV=1
MSNFKGKTVWVTGAGSGIGYRTALRFHEAGAKVFGFDLKFPDSMPFETRILDVSDDCAVQKICPPLLQENGLDILVNGAGILRLGSAETLSREDWESSINVNAGAAFNLFKILIPHFQRQRSGNIVSIASNAAHVPRVNMAVYCASKAAMRSLCLSVGLELAPFGIRCNIVSPGSTLTPMLEGMFDDNIAHQRLIHGVTEQFKLGIPLGKIAHPDEIASVILFLASEQASHVTLQDIVIDGGATLGA

SEQ ID NO: 92324 - protein, 254 aa, unidentified
  source 1..254: note = Xinfangfangia sp.
  REGION 1..254: note = tr|A0A3P5XZ11|A0A3P5XZ11_9RHOB 2,3-dihydro-2,3-dihydroxybenzoate dehydrogenase; OS = Xinfangfangia sp. CIP 111625 OX=2483812 GN=dhbA PE=4; SV = 1
MRLTGFQDALALVTGAGGGIGRALVGLLLDAGARVVATDLTAPDLPPRQGLTCLPLDVSDAGAVEALVAQVEADLGPVRFGIAVAGALATGLVTETSDEDWRRVFAVNADGVFHLTRALARRMIGREPRGALVAVSSNAAGVPRYGMAGYAASKAAATMYMRALGLELAPHGIRCNIVAPGSTRTPMQTGMWADESGEARVIAGLPEQFKPGIPLGKIAEPGDIAAAVMFLLSDQAGHVTMADLYVDGGATQRG

SEQ ID NO: 92325 - protein, 274 aa, Yersinia frederiksenii
  REGION 1..274: note = tr|A0A0T9UC78|A0A0T9UC78_YERFR 3-ketoacyl-ACP reductase OS=Yersinia frederiksenii OX=29484 GN=fabG_5; PE = 4 SV=1
MAANQISSAKSMPAATLVAQLDFTGKRVWVTGAGQGIGYQIACQFFALGADVVGLDKSFHADPTSAAQGYPFTTALLDISHPQQVELVCQHLLSEVPRLDILVNGAGILRMADTEELSLEDWQQCFNVNVSGAFYLLRQLIPQFKQQRYGAVVTLGSNAAHVPRIKMSAYCASKAALTSLSHCVGLELAAYGVRCNLVSPGSTDTLMQRGMWHSEDAQQQTIAGFPLQYKLGIPLGKIATPQEITNTVVFLASDLASHITMQDIVVDGGATLSA

SEQ ID NO: 92326 - protein, 249 aa, Yersinia frederiksenii
  REGION 1..249: note = tr|A0A0B6FT46|A0A0B6FT46_YERFR 2,3-dihydro-2,3-dihydroxybenzoate dehydrogenase; OS = Yersinia frederiksenii Y225 OX=1454377 GN=AW19_2614; PE = 4 SV=1
MDFTDKRVWVTGAGQGIGYQIASQFVALGADVVGLDKSFSATQNFPFTTALLDISNPQQVALVCQHLLSQVPRIDVLVNGAGILRMAETEALSLEDWQQCFNVNVSGAFYLLRQLIPQFKWQRFGAVVTIGSNAAHVPRIQMSAYCASKAALTSFSHCVGLELAAYGVRCNVVSPGSTDTPMQRGMWHSEDAQQRTIAGFPPQYKLGIPLGKIATPQEIANTVVFLASDLASHITLQDIVVDGGATLSA

SEQ ID NO: 92327 - protein, 249 aa, unidentified
  source 1..249: note = Yersinia hibernica
  REGION 1..249: note = tr|A0A481QL17|A0A481QL17_9GAMM 2,3-dihydro-2,3-dihydroxybenzoate dehydrogenase; OS = Yersinia hibernica OX=2339259 GN=dhbA PE=4 SV=1
MDFSGKRVWVTGAGQGIGYQIACQFVAQGAEVVGLDKAFAPTQSYPFTTVLLDISHPQQVALVCQHLLSETPRLDVLVNGAGILHMAETEALSLKDWQQCFNVNVFGAFYLLRQLIPQFKQQRFGAVVTIGSNAAHAPRMRMSAYCASKAALTSFSHCVGLELAPYGVRCNLVSPGSTDTPMQRGMWHSADAEQQTIAGFPQQYKLGIPLGKIATPQEIANTVVFLASDLASHITMQDIVVDGGATLSA

SEQ ID NO: 92328 - protein, 261 aa, Yersinia intermedia
  REGION 1..261: note = tr|A0A0U1ELR9|A0A0U1ELR9_YERIN 3-ketoacyl-ACP reductase OS=Yersinia intermedia OX=631 GN=fabG_1 PE=3 SV=1
MTFDKHYIAVITGACGGIGESVAHALAKEGVSLALLDNNATQLATLVATLQNNHPQPIAGFTVDVADDRCVAEAFTAIGRQLGPVGYLVNGAGVLCHASVAETQPQDWAKTFAVNATGVFNTSRHAANLMMAQRKGSIVTIASNAARVPRATMAAYCASKAAAQAFTYALGLEVAPYGIRCNVVAPGSTDTPMLRGMWHSESDRQNTLNGNPQQFRIGIPLNKVATAEEIAAAVCFYLCEESGQTTLSTLLVDGGAALGSC

SEQ ID NO: 92329 - protein, 269 aa, Yersinia kristensenii
  REGION 1..269: note = tr|A0A0T9L4V7|A0A0T9L4V7_YERKR Putative oxidoreductase OS=Yersinia kristensenii OX=28152 GN=entA; PE = 4 SV=1
MAANQVSSAKNTRTISQATPMDFTGKRVWVTGAGQGIGYQIASQFVALGADVVGLDKTFSAAQNPPFTTALLDISNPQQVELVCQHLLSQVPRIDILVNGAGILRLAETEALSLEDWQQCFNVNVSGTFYLLRQLIPQFKQQRFGAVVTISSNAAHVPRIQMSAYCASKAALTSFSHCVGLELAAYGVRCNVVSPGSTDTPMQRGMWRSEDAQQQTIAGFPQQYKLGIPLGKIATPQEIAHTVVFLASDLASHITMQDIVVDGGATLSA

SEQ ID NO: 92330 - protein, 259 aa, Yersinia massiliensis
  REGION 1..259: note = tr|A0A0T9PXF7|A0A0T9PXF7_9GAMM 3-ketoacyl-ACP reductase OS=Yersinia massiliensis OX=419257 GN=fabG_4; PE = 4 SV=1
MAAMQMDFTGKRVWVTGAGQGIGYQVACQLAALGADVVGLDKAFSTDNTSATRDYPFATEFLDISHPQQVEGVCQRLLRQVPRIDVLVNGAGILRMADTEELSLEDWKQCFDVNVSGAFYLLRQLIPQFKQQRFGTVVTISSNAAHVPRMQMSAYCASKAALTSFSHCVGLELAAYGVRCNVVSPGSTDTPMQRSMWHSEDAQQQTIAGFPQQYKLGIPLGKIATPSEIANTVAFLASDLASHITLQDIVVDGGATLSA

SEQ ID NO: 92331 - protein, 255 aa, Yersinia nurmii
  REGION 1..255: note = tr|A0A0T9KZZ9|A0A0T9KZZ9_9GAMM Putative oxidoreductase OS=Yersinia nurmii OX=685706 GN=entA PE=4; SV = 1
MAGTMAQMDFTGKRVWVTGAGQGIGFETAKLFTALGAEVFGLDKNFPNEEYPFTTAVLDISQPVQVADVCEQRLEVVSGIDVLVNAAGILRMGEAEALSLDDWQQCFDVNVSGAFYLLKQLIPVFKRQRSGAIVSIGSNAAHVPRMQMAAYCASKAALTSFSHCVGLELAPYGVRCNLVSPGSTDTPMQRGMWQTPDAEQRTIAGFPQQYKLGIPLGKIATPAEIAQTVAFLASDLASHITLQDMVVDGGATLAA

SEQ ID NO: 92332 - protein, 251 aa, Yersinia ruckeri
  REGION 1..251: note = tr|A0A0A8VLD7|A0A0A8VLD7_YERRU 2,3-dihydro-2,3-dihydroxybenzoate dehydrogenase of siderophore biosynthesis OS=Yersinia ruckeri OX=29486; GN = entA PE=4 SV=1
MVQMDFTAKRVWVTGAGQGIGFETAKLFGELGADVLGLDKAFPNGNYPFTTVVVDISQPAQVADVCEHLLEDVPRVDVLVNAAGILRLGDIEALGLDDWQQCFDVNVSGAFYILRHLIPYFKQQGAGTVVSIGSNAAHVPRMQMAAYCASKAALTSFSHCVGLELAPYGVRCNLVSPGSTDTPMQRGMWQAADAEQRTIAGFPQQYKLGIPLGKIATPQEIAHTVAFLASDLASHITLQDIVVDGGATLAA

SEQ ID NO: 92333 - protein, 251 aa, Yokenella regensburgei
  REGION 1..251: note = tr|A0A2X2Q4J6|A0A2X2Q4J6_9ENTR 2,3-dihydro-2,3-dihydroxybenzoate dehydrogenase; OS = Yokenella regensburgei OX=158877 GN=entA PE=4 SV=1
MAGFDFHGKHVWVTGAGKGIGYATALAFTEAGASVTGLDLTFDGEHYPFATEVLDVADAEEVALVSRRLLAHQPRLDVLVNAAGILRMGVTDALSQQDWQQTFAVNVGGAFNLFQNTMAQFRQQQGGAMVTVASDAAHTPRIGMSAYGASKAALKSLALTVGLELAASGVRCNLVSPGSTDTDMQRTLWRSDDAEQQRIRGFGEQFKLGIPLGKIARPQEIASTVLFLASDQASHITLQDIVVDGGSTLGA

SEQ ID NO: 92334 - protein, 258 aa, Zooshikella ganghwensis
  REGION 1..258: note = tr|A0A4P9VPQ7|A0A4P9VPQ7_9GAMM 2,3-dihydro-2,3-dihydroxybenzoate dehydrogenase; OS = Zooshikella ganghwensis OX=202772 GN=B9G39_11560 PE=4; SV = 1
MNFNKDIIVVSGAANGIGLATVNHLLDTGAHVVALDNDKAALNVLSEKKRLNKLNLYTYQVDVSNSHEVEQVIQHVEENIGAINKLVCSSGILRMGALNTLSDEDWHSTFAVNTTGVFNLCRAVTVRMQQRQSGAIVAVSSNAASVPRANMGAYAASKAAVTSFIKCLGLELAAANIRCNIVSPGSTDTQMQRQLWTDDSGPQRVIDGDLANHRLGIPLQKIATVDDIAQAILFLLSDQAHHITMHDLRVDGGATLGC

SEQ ID NO: 92335 - protein, 188 aa, Acetobacter ghanensis
  REGION 1..188: note = tr|A0A0U5BN43|A0A0U5BN43_9PROT Isochorismatase hydrolase OS=Acetobacter ghanensis OX=431306 GN=AGA_1P44; PE = 4 SV=1
MISLQATKTALVLIDLQKGITGLPLAPTPGALIVERSKELTARFRTAGAPVILVNVAFALDFADAVHTVVDRSFSPPGGFAPDWMELVDGLAEPTDLRITKRQWGAFYGTDLDLQLRRRGITTIVVGGIATNLGVESTARAAHEHGYNVVLVEDVMSTFTEEMQRFACEEIFPRLGRVTTSDAIGLDA

SEQ ID NO: 92336 - protein, 211 aa, Acetobacter senegalensis
  REGION 1..211: note = tr|A0A0U5EYG6|A0A0U5EYG6_9PROT Isochorismatase hydrolase OS=Acetobacter senegalensis OX=446692; GN = ASN_1282 PE=4 SV=1
MSGAKQIVAKPMIVGQPALIVVDIQKGSFAPRPPSSRLEFMPDAVERYTRARTVVDAAREAGIPIIFVQEAHRRTMVDFGRELDGSESVHCLEGQSGTDFAVEELGMLEDDYRITKRRYSVFFGTDMEILLKGLGVQTVIMVGGFTDVCVHYSFVDGHQMDYYCRVVEDCVSGSSYRAHDAALEAMEYLQAGARRSAQDMVDAFAAIRQQA

SEQ ID NO: 92337 - protein, 176 aa, Acetobacterium woodii
  REGION 1..176: note = tr|H6LJE7|H6LJE7_ACEWD Isochorismatase; OS = Acetobacterium woodii (strain ATCC 29683 / DSM 1030 / JCM 2381 / KCTC 1655 / WB1) OX=931626 GN=Awo_c31470 PE=4; SV = 1
MKSVLLVIDYQKDFVDGSLGFPQSVKLEELIAQKIEAYRSNGWEIVFTYDTHTADYLNTQEGKNLPVVHCIKGTPGWELYGKVAKLRQDSDTCIEKIAFGSMELANYLAANQYDRVELVGVVSNICLISDAVLAKAALPEAEIIVDASCVASNEDHLNEAALDVMASMQIRIINRI

SEQ ID NO: 92338 - protein, 205 aa, Achromobacter insolitus
  REGION 1..205: note = tr|A0A3S4UGG0|A0A3S4UGG0_9BURK Probable isochorismatase OS=Achromobacter insolitus OX=217204; GN = phzD PE=4 SV=1
MNHPTIRAIAGATAPQSIDPASTALLVIDFQNEYFSGRLPIPDGPAALRNAARLVAFADQNGIPVFHIQHATPAGSPVFAEGSAGLDFHPDLRPAPGHTVLRKSTVSVFPSTDIDQRLKAAGIRTLLVTGLMTHACVAGAARDAVPLGYQVIVAADACATRDLDTGASDSSALPHAILHRAALASIDDTFGDIMTTKQVLELPLA

SEQ ID NO: 92339 - protein, 285 aa, Achromobacter sp.
  REGION 1..285: note = tr|A0A0M7P067|A0A0M7P067_9BURK Isochorismatase; OS = Achromobacter sp. ATCC35328 OX=1806490 GN=entB PE=4 SV=1
MAIPKLQAYALPESHDIPQNKVDWAFEPQRAALLIHDMQDYFVSFWGENCPMMEQVIANIAALRDYCKQHNIPVYYTAQPKEQSDEDRALLNDMWGPGLTRSPEQQKVVDRLTPDADDTVLVKWRYSAFHRSPLEQMLKESGRNQLIITGVYAHIGCMTTATDAFMRDIKPFMVADALADFSRDEHLMSLKYVAGRSGRVVMTEELLPAPIPASKAALREVILPLLDESDEPFDDDNLIDYGLDSVRMMALAARWRKVHGDIDFVMLAKNPTIDAWWKLLSREVK

SEQ ID NO: 92340 - protein, 190 aa, Achromobacter spanius
  REGION 1..190: note = tr|A0A3S4PSS4|A0A3S4PSS4_9BURK Probable isochorismatase OS=Achromobacter spanius OX=217203 GN=phzD; PE = 4 SV=1
MSTMNTLVPARSALLVMHYQTDIINLFPSVAPTLLANTRTLCDAARRQGIRVYFAQIRFSLGYPEVSPLNKNGQGIKQLGLFTDDQISPELDRQPDEPIIIAHRASVFFGTDLELRLSAQGIDTLLMVGIASTGVMLSSIAHASDADYRLFTVKDCCYDPDVIVHEHLFSTAFASRTTVLSLADALALLA

SEQ ID NO: 92341 - protein, 187 aa, Acidilobus saccharovorans
  REGION 1..187: note = tr|D9Q1R5|D9Q1R5_ACIS3 N-carbamoylsarcosine amidase related protein OS=Acidilobus saccharovorans (strain DSM 16705 / JCM 18335 / VKM B-2471 / 345-15) OX=666510 GN=AS AC_0847 PE=4 SV=1
MSALRPALVIVDMLNDFIDGALATPEAKATVAPARKVLEAFRRNGWPVIYVNDAHYPTDIEMPLWGPHAMKGTRGAEVYSELAPREGEYVLEKHAYSGFFGTALDHILRSLGVDTVVLVGLDADICVRHTAADAFFRGYKVVVVRDAVAARIDKNWETYYKKVYGATVLNSDEVESYLRSAQPITAR

SEQ ID NO: 92342 - protein, 187 aa, Acidithiobacillus caldus
  REGION 1..187: note = tr|A0A059ZXA2|A0A059ZXA2_ACICK Isochorismatase; OS = Acidithiobacillus caldus (strain ATCC 51756 / DSM 8584 / KU) OX=637389 GN=Acaty_c0733 PE=4 SV=1
MSGLGRAQIRPEQAVLLLVDLQDRLLNTLAPQTRHLLLRRVDAMVALCQRLAIPILATAQYPEGLGPLPPERTEPCSAVFAKTSFSCLGQPDLRQWLEAHDDRRQVWIAGVETHVCIVQTALDLETQGWRAVVLEDACASRDPAHRDSALARLRQAGVLVAPAESVFYESLRDARHPAFRELAAQWR

SEQ ID NO: 92343 - protein, 181 aa, Acidithiobacillus thiooxidans
  REGION 1..181: note = tr|A0A543PZ87|A0A543PZ87_ACITH Putative isochorismatase OS=Acidithiobacillus thiooxidans ATCC 19377 OX=637390 GN=phzA PE=4 SV=1
MRIEAQQSLILTIDMQDRLLGAIPETERNQAIQNVTRLLAAAAALEIPRLATVQYAKGLGPIRADLQSFCAPPLDKTVFSCWRHAPLQNLLETEQSRRQIILTGVETHICVLQTALDLHGAGWQPVVVADACASRDDANAQSALLRLRQAGITVAVAESVFYEWLGDAAHPQFRSLAPAWR

SEQ ID NO: 92344 - protein, 213 aa, Acinetobacter baumannii
  REGION 1..213: note = tr|D0C789|D0C789_ACIB2 Isochorismatase; OS = Acinetobacter baumannii (strain ATCC 19606 / DSM 30007 / CIP 70.34 / JCM 6841 / NBRC 109757 / NCIMB 12457 / NCTC 12156 / 81 ) OX=575584 GN=entB PE=4 SV=1
MSIPKIASYSMPQAHEFTPNKTNWPLHTSRAVLLVHDMQQYFLDFYDLTQEPIPELIQNTKALIDAARQSNIPVVYTAQPGNQSPEYRQLLTDFWGPGLKDEPNITQIFPKISPQKNDTVLTKWRYSVFKFSPLEQLMRDSGRDQLIICGVYAHIGCLMSAAEAFMLNIQPFLCGDALADFSREEHDMALKYASTRCAQVMTTQQVIQAWIQE

SEQ ID NO: 92345 - protein, 179 aa, Acinetobacter baylyi
  REGION 1..179: note = tr|Q6F743|Q6F743_ACIAD Putative isochorismatase; OS = Acinetobacter baylyi (strain ATCC 33305 / BD413 / ADP1); OX = 62977 GN=ACIAD3473 PE=4 SV=1
MKQALMVIDVQNDYFEGGAMALVHPEQALHHIQQLERWFLAQNLPIIYIQHINSAQASFFRPDTNGAELHSDLQLQRNSIILQKHKPNSFLATDLDQILQQLSVNQLVITGMMTHMCIDSTTRAATELGYQPILIADATATRDLHFNDQLTSARDVQTAFLAALSNFATIQKTHQFIQA

SEQ ID NO: 92346 - protein, 182 aa, Acinetobacter bereziniae
  REGION 1..182: note = tr|A0A0A8TTY4|A0A0A8TTY4_ACIBZ Isochorismatase; OS = Acinetobacter bereziniae OX=106648 PE=4 SV=1
MKMSRTALLIIDVQNDYFPQGKMELFGAEQALKHINRLEADFIKNAQPIIYIQHIAKQAQATFFQEGTEGAELHAGLQINQDPIIIEKHYPNSFFQTNLKQVLDQLKIEHLVISGMMTHMCVDATSRAAAELGYQPIIIAEATATRQLSYAGKTVQAQDVQTACLSAFQMFSQVISIDDYLK

SEQ ID NO: 92347 - protein, 180 aa, Acinetobacter calcoaceticus
  REGION 1..180: note = tr|A0A380VHX1|A0A380VHX1_ACICA Isochorismatase; OS = Acinetobacter calcoaceticus OX=471 GN=dhbB_1 PE=4 SV=1
MKQALLVIDVQNDYFKNGKMELVGPDQALDKIKQLEQYFNEKDLPIIYVQHINPPQASFFQENTEGVLLHSELSAGGDSLIVTKHYPNSFLETNLEELLKAHQIEQLVITGMMTHICIDSGTRAAKELGYQPILIGDATATRDLSHNGKTVKAEDVQTAFLAALGMFASVQNTADFLAKS

SEQ ID NO: 92348 - protein, 289 aa, Acinetobacter haemolyticus
  REGION 1..289: note = tr|D4XRX2|D4XRX2_ACIHA Phosphopantetheine attachment domain protein OS=Acinetobacter haemolyticus ATCC 19194; OX = 707232 GN=entB PE=4 SV=1
MAISKISTYLMPQPESYPNNKTDWQLDPARAVLLIHDMQRYFLNFYDAESELIKTVIDNLVQLKNWAHQHNIPVVYTAQPYEQPAEDRALLNAMWGPGLPASTIDQQKIIDQLSPDQQDIVLTKWRYSAFKRSDLLERMQHWNRDQLIIGGVYAHIGCMITAVEAFMSDIQPFLVGDAVADFSEEEHRLALKYVSSRCGQVMDTESVVGHVATGITRPWLEQKVQQLIEEDELDPEENLILYGLDSLRIMQFSSELKAQGINISFEELGRTPTLSNWWSLVDARQRIAG

SEQ ID NO: 92349 - protein, 180 aa, Acinetobacter junii
  REGION 1..180: note = tr|A0A380UE25|A0A380UE25_ACIJU Putative isochorismatase OS=Acinetobacter junii OX=40215 GN=dhbB; PE = 4 SV=1
MKQALLIIDVQNDYFKDGKMELVNPEHALEKINQLEYYFNQNNLPIIYIQHINPASAGFFLENTLGVELHPELLLSDSSLVVQKHFPNSFLKTNLQSMLQKLQIEQLVITGMMTHMCIDSGTRAACELGYQPILIADATATRDLEYKNSIVKASDVQSAFLSALNVFAKVQNTSDFLNNQ

SEQ ID NO: 92350 - protein, 289 aa, unidentified
  source 1..289: note = Acinetobacter lactucae
  REGION 1..289: note = tr|A0A3R9RZA0|A0A3R9RZA0_9GAMM Acinetobactin biosynthesis bifunctional isochorismatase/aryl carrier protein BasF OS=Acinetobacter lactucae OX=1785128 GN=basF; PE = 4 SV =1
MAIAKISTYLMPKRESYPNNKTDWQLDSSRAVLLIHDMQRYFLNFYDAESELIKTVVNHLVQLRSWAHQNNVPVVYTAQPYEQPAADRALLNAMWGPGLPASTIDQQKIIDQLSPAEHDIVLTKWRYSAFKRSDLLERMQNWNRDQLIIGGVYAHIGCMVTAIEAFMSDIQPFLVGDAVADFSEEEHRLALKYVSSRCGQVVDTESVVGQVATAITRPWLEQKVQQLIEEDELDPEENLILYGLDSLRIMQFSSELKAQGINISFEELGRTPTLSNWWSLVDARQRIAG

SEQ ID NO: 92351 - protein, 289 aa, Acinetobacter pittii
  REGION 1..289: note = tr|A0A4Q7C2T7|A0A4Q7C2T7_ACIPI Acinetobactin biosynthesis bifunctional isochorismatase/aryl carrier protein BasF OS=Acinetobacter pittii OX=48296 GN=basF PE=4; SV = 1
MAISKISTYLMPERESYPNNKTDWQLDPSRAVLLIHDMQRYFLNFYDAESELIKTVVNHLVQLRTWAHQNNVPVVYTAQPYEQPEADRALLNAMWGPGLPASTIDQQKIIDQLSPAEHDIVLKKWRYSAFKRSDLLERMQNWNRDQLIIGGVYAHIGCMVTAIEAFMSDIQPFLVGDAVADFSEEEHRLALKYVSSRCGQVIDTESVVGQVATGITRPWLEQKVQQLIEEDELDPEENLILYGLDSLRIMQFSSELKAQGINISFEELGRTPTLSNWWSLVDARQRIAG

SEQ ID NO: 92352 - protein, 289 aa, Acinetobacter sp.
  REGION 1..289: note = tr|A0A022ISL9|A0A022ISL9_9GAMM Isochorismatase; OS = Acinetobacter sp. 1000160 OX=1310800 GN=entB PE=4 SV=1
MAIAKISTYLMPEPQSYPINKTDWQLEPKRAVLLIHDMQRYFLNFYDAESELIKTVVNHLVRLRSWAHQNNVPVVYTAQPYEQPASDRALLNAMWGPGLPASTIDQQSIIDQLSPAEHDIVLTKWRYSAFKRSDLLERMQNWNRDQLIIGGVYAHIGCMVTAVEAFMNDIQAFLVGDAVADFSEEEHRLALQYVSSRCGQVVDTESVVGQATSAITRPWLEQKVQQLIEEEELDPEENLIMYGLDSLRIMQFSSELKAQGINISFEELGRTPTLSNWWSLVDARQRIAG

SEQ ID NO: 92353 - protein, 327 aa, Actinobacillus pleuropneumoniae
  REGION 1..327: note = tr|A0A4U9TPS7|A0A4U9TPS7_ACTPL Isochorismatase; OS = Actinobacillus pleuropneumoniae OX=715 GN=dhbB PE=4 SV=1
MALPKISPYPMPGETDLPKNKVAWTADPNRAVLLIHDMQQYFIDAFTPDQSPVVELIAHIQKLRSCCAELGIPVIYSAQPGGQAPEQRGLLQDFWGSGINDGPYQKKFVDAVAPSERDMLLTKWRYSAFQKTNLHEIMRELDRDQLMICGIYAHIGCLLTAGEAFMKDIQPFFIADALADFSLEKHRLALVYAAERCAVTLTTERLIDSLTQARHPVPGRSEAPSGEGRPGDAAEEPSPLTLQTLRENVAELLQERPSSLGEDDHLIEYWGLDSIRIMSLAERFRREGLDISFVELAEQPTLAGWWGLLSDKQNVRVSPPNYDYYTV

SEQ ID NO: 92354 - protein, 699 aa, unidentified
  source 1..699: note = Actinobacteria bacterium
  REGION 1..699: note = tr|A0A0N1G4T9|A0A0N1G4T9_9ACTN (2,3-dihydroxybenzoyl)adenylate synthase, Isochorismatase; OS = Actinobacteria bacterium OK074 OX=1592327 GN=OK074_3045; PE = 4 SV=1
MSSDPSARSDAARPQDHHPTPTPLPAPPPDPADATTLPELLHARAGLHPERTALVAPGSARRTWTYRELADRADRRAAGLLARGIRRGDRVVVQLPAVMELFELLLALLRIRAVPVVVPPAAHEAVLCAVCGFAEAVACVVPAVWGGADQRPTATRLLARVPTLHEVYVTGDAPGHTRLADVTHEPRTDLEPPAPDDLALLQLAGAGVGVPRLVPRGQGELLRTLRERAAPLDLDEDTVHLVATPERPQPVPGLLDWLAVLCAGGRLVLGSRPDPDSAFPLLATEGVTHTALTPPLAVTWTHAAAVTAYDLSALRTLVVGGGPFEERAARRVRPALGCRLRQVYGTVEGLVSCTGVADGPEPAVTTQGRPVSAADEVRIVDEDDREVSPGERGQLLARGPATVRGYWRSPAHDARHFTPDGFHRTGATARLTAAGHLVLERAPQEPDAGAVARPLPSSLPRRAVRPLPTPYGRRAQLPDAAPGPYFMPAPVLLPADRTGWTLETSRAALLVLNVQNTFVRVLEREAAPVAELLANVGRLARSAHAAGVPVIYSVQAHEGRATDRWPAPYAQLAGARPGEADGTIASPVRPLRGDTVLTARKYSAFARTRLDGRLRDLRRDQLVVVGLYARVGVLTTAADAWMQGLEPFVVADAVADVTAGHHETALRWVADTSGAVTTTQRVATAFGELHATASAAEAV

SEQ ID NO: 92355 - protein, 180 aa, unidentified
  source 1..180: note = Actinokineospora spheciospongiae
  REGION 1..180: note = tr|W7INU0|W7INU0_9PSEU Isochorismatase of siderophore biosynthesis OS=Actinokineospora spheciospongiae OX=909613 GN=UO65_6513 PE=4 SV=1
MTQPVADPYDMSAAAVLPERASSWSCRSDRALLLVHDLPAEIDTECAPLRDLAFNLDQLRETCHELGVPVARSSVRFEGGPGPGEHWLANLSADHFGGLRALLDSFGRDQLLLTGVRAHAACLMSAAGPALAGVQVFCVADAIVDRSLDEHRHSVRAAADHGATPITTGQVIGQLLGVLT

SEQ ID NO: 92356 - protein, 200 aa, unidentified
  source 1..200: note = Actinomadura parvosata
  REGION 1..200: note = tr|A0A2P9I5T5|A0A2P9I5T5_9ACTN Isochorismatase; OS = Actinomadura parvosata subsp. kistnae OX=1955414; GN = KIS93_02843 PE=4 SV=1
MSVSTTLRDVIGLDRELPRLSTATLVLIDFQNTYCEGVMALPGADRALDAAARLLERARAAGTPVVHVINDGGEGTPYDIRAEIGQIEPRVAAREGEAVVVKGFPNSFHETDLLETLRKLDAGPDLVLAGFMTHMCVQFTAQGAFNLGYRPTVVAEACATRPLAAPGGEPISAEQLHAAALTTIGDLFGLVAARVDDLPA

SEQ ID NO: 92357 - protein, 214 aa, Actinomadura sp.
  REGION 1..214: note = tr|A0A2P4UF74|A0A2P4UF74_9ACTN Isochorismatase; OS = Actinomadura sp. 5-2 OX=1926885 GN=dhbB_2 PE=4 SV=1
MALPEIAPYPMPGADEIPPPRVGWRPDPRRAVLLVHDMQNYFLDAFAGDPIPTLIANIDALRRAARAAGVPVVYTAQPGGQTPDQRGLQLDFWGAGVGAAAREPAIVDALAPQDGDILLTKWRYSAFLRTDLADLLLPRGRDQLIVTGVYAHIGCQATAVEAFMRDVQPFFVADALADFSAADHRAAVSFAARRCAVVTATAPLVRALAAVPAR

SEQ ID NO: 92358 - protein, 214 aa, Actinomyces sp.
  REGION 1..214: note = tr|F9ECJ8|F9ECJ8_9ACTO Isochorismatase hydrolase; OS = Actinomyces sp. oral taxon 448 str. F0400 OX=888056; GN = HMPREF9062_0170 PE=4 SV=1
MTDLDELVRTAPHRALVLVDVQNEYAHLPLRIRHPSLSDCLERIERALDVAENAGLPVACVQHAGPPGGTIFNPGGKGFELCPCIERRRTAQWKRVVKRRGSIYAGTDLAAWLHEQDVDTVTLVGFMANNCILASAAWGETIGLTTEVLSDAVGAINLRNCAGRANARTVHATMMALLHSNWAAVATTDDWCRALGRDEPLPHSNLVASAMMPL

SEQ ID NO: 92359 - protein, 214 aa, unidentified
  source 1..214: note = Actinomycetales bacterium
  REGION 1..214: note = tr|A0A1R4EQP9|A0A1R4EQP9_9ACTO Isochorismatase; OS = Actinomycetales bacterium JB111 OX=1434822; GN = CZ771_00720 PE=4 SV=1
MTDLGGSLAVVVVDVQNDFCSPDGTMAGRGLDLEQIPAASANLVRLAEAARAAGVPVVHVRTHHDEDVDSAAWDARYNVPDGAPVPPRNCRPGTWGAEPWAVTDLPGEQVHIKHRYSGFTSPTLEAGLRELGATTLLVCGVATEVCVETTLRDALERDFHVAVVGDASATYARDIHDQAVARMGRHWGLALTTDQAVEAVGRASSSARAGDAAG

SEQ ID NO: 92360 - protein, 188 aa, Actinoplanes sp.
  REGION 1..188: note = tr|G8SAM7|G8SAM7_ACTS5 Isochorismatase hydrolase; OS = Actinoplanes sp. (strain ATCC 31044 / CBS 674.73 / SE50/110) OX=134676 GN=ACPL_6811 PE=4 SV=1
MTEALIVIDVQESFRARPLWAAVDNPDLIPNVQRLVDRARAAGHLVVWVLHAEPGTGGVFDPASGFVRLMAELTPADGEPILVKTVHNAFTTTDLQFRLTSAGVRAVTVCGLRTEQCVETTARVASDLGYQVTFVTDATATFPIPHRDAPDDLDDPRTLSAADVVARTEYALAGRFATITTVDEVEKG

SEQ ID NO: 92361 - protein, 303 aa, Aeromonas caviae
  REGION 1..303: note = tr|A0A2X4NKP6|A0A2X4NKP6_AERCA Isochorismatase; OS = Aeromonas caviae OX=648 GN=entB PE=4 SV=1
MAIPTLNNYAMPSQWKANKVDWSLDPKRAALLIHDMQEYFTAFYGENSPLIAALTEQLAAVRKQCKALGIPVFYTAQPKDQSPEDRALLSDMWGPGLNKRPEQQQVVAALRPERDDTVLVKWRYSAFQRSELEQMLKALGRDQLIIGGIYGHIGCMMTACDAFMRDIQPFFLADGVADFSLADHQMALDYVATRCGKVIRCEEVLALAPASASAAQPTNPLLTYEGLKARLLSHIDEDEDEFDPDENLIDYGLDSVRIMALLTEWRAAGVELGFVDLAKLPTLNGWWRLIEARLAAQALEVTP

SEQ ID NO: 92362 - protein, 302 aa, Aeromonas encheleia
  REGION 1..302: note = tr|A0A3S4SRC6|A0A3S4SRC6_9GAMM Isochorismatase; OS = Aeromonas encheleia OX=73010 GN=entB PE=4 SV=1
MAIPTLSAYAMPSQWKANKVSWTLEPRRAALLIHDMQEYFTAFYGEHSPLIRDLTARLAAVRRHCKALGIPVYYTAQPKDQAPEDRALLNDMWGPGLNKSPELQQVVAPLRPERDDVVLVKWRYSAFQRSELEQMLKAQGRDQLIIGGIYGHIGCMMTACDAFMRDIQPFFLADGVADFSLADHQMALDYVATRCGKVILCAEVLAIAAAPKSEQQNPLLTYDGLKARLLSHIDEDEAEFDPDENLIDYGLDSVRIMSLLTEWRAAGVELGFVDLAKLPSLNGWWRLIEAKLAEQKTREVTP

SEQ ID NO: 92363 - protein, 312 aa, Aeromonas hydrophila
  REGION 1..312: note = tr|V9ZU69|V9ZU69_AERHY Isochorismatase OS=Aeromonas hydrophila 4AK4 OX=1354302 GN=AH4AK4_1749 PE=4 SV=1
MAIPTLNNYAMPSQWKANKVDWILDPKRAALLIHDMQEYFTAFYGEHSPLIAALTERLAAVRKQCKALGIPVFYTAQPKDQSPEDRALLNDMWGPGLNKRPEQQQVVAALRPEPDDTVLVKWRYSAFQRSELEQMLKELGRDQLIIGGIYGHIGCMMTACDAFMRDIQPFFLADGVADFSLADHQMALDYVATRCGKVIPCEEVLALAPASASVAQSNSLSANPLLTNPLLTYEGLKARLLSHIDEDEGEFDPDENLIDYGLDSVRIMALLTEWRAAGVELGFVDLAKLPTLNGWWRLIEARLAVQALEVTP

SEQ ID NO: 92364 - protein, 302 aa, Aeromonas salmonicida
  REGION 1..302: note = tr|A0A449HTV9|A0A449HTV9_AERSA Isochorismatase; OS = Aeromonas salmonicida OX=645 GN=entB_1 PE=4 SV=1
MAIPTLNNYAMPSQWKANKVNWTLNPKRAALLIHDMQEYFTAFYGENSPLIQALTERLAAVRKQCKALGIPVYYTAQPKDQSPEDRALLNDMWGPGLNKSPELQQVVAGLRPERDDTVLVKWRYSAFQRSELEQMLKDLGRDQLIIGGIYGHIGCMMTACDAFMRDIQPFFLADGIADFSLADHQMALDYVATRCGKVIPCEEVLALAPASTFAVQTNPLLTYEGLKARLLSHIDEDEGEFDPDENLIDYGLDSVRIMSLLTEWRAAGVELGFVDLAKLPTLNGWWRLIEAKLAAQALEVTP

SEQ ID NO: 92365 - protein, 177 aa, Agarivorans albus
  REGION 1..177: note = tr|R9PHB1|R9PHB1_AGAAL Isochorismatase; OS = Agarivorans albus MKT 106 OX=1331007 GN=AALB_0854 PE=4; SV = 1
MKSAVLVIDVQSILFDPEPQPFESQVVLNKINQVTSLARAKSVPVIFIQHEHANSVIEYGTEGWALQSSLVTQTGDHFVRKTTPDSFLNTNLEELLKELAVDSLIMCGYASEFCVDTTVRRAAGLGYPVVLVSDAHTTHDKEHASGAQIRAHHNATLANISSFGVKIEAIETAKLWP

SEQ ID NO: 92366 - protein, 289 aa, unidentified
  source 1..289: note = Agrobacterium deltaense
  REGION 1..289: note = tr|A0A1S7U4V9|A0A1S7U4V9_9RHIZ Isochorismatase; OS = Agrobacterium deltaense NCPPB 1641 OX=1183425 GN=entB; PE = 4 SV=1
MTIPTISDYPMPVAASFPANKTKWQPDAKRAVLLIHDMQRYFLRFYEADGKLMTTLIDNLAKVKAWAVQNGVPVIYTAQPHNQPPGDRALLNDMWGPGLTVVDPELQKVVDKLAPTPDDVVLTKWRYSAFQRSDLAERMKGWGRDQIIVGGVYAHIGCMMTAVEAFMKDIQPFMIGDGVADFSEAEHRMALQYVATRCGVVIDTASLVGAGEATGTREWLKARVLQMVEDESDIDPDENLIFYGLDSLQVMKLAGELKERGVTVGFDELARVPTLSAWWALIDEKRLAA

SEQ ID NO: 92367 - protein, 229 aa, unidentified
  source 1..229: note = Agrobacterium fabrum
  REGION 1..229: note = tr|A0A1S7QWY1|A0A1S7QWY1_9RHIZ Putative Isochorismatase family protein OS=Agrobacterium fabrum str. J-07 OX=1183433 GN=AGR8A_Lc20074 PE=4 SV=1
MSKLEVLTPANSQLIFIDQQPQMAFGVQSIDRQTLKNNVVGLAKAAKIFNIPTTITTVETESFSGNTFPELLAVFPENDILERTSMNSWDDQNVRDALAKNAATGRRKIVVSGLWTEVCNTTFALSALHDVADYEIYMVADASGGTSLDAHKYAMDRMVQAGVIPVTWQQVLLEWQRDWARKETYDAVTSLVKEHSGAYGMGIDYAVTHVHGGAERVKHGKRIGPNPAK

SEQ ID NO: 92368 - protein, 229 aa, unidentified
  source 1..229: note = Agrobacterium genomosp.
  REGION 1..229: note = tr|A0A1S7N8S9|A0A1S7N8S9_9RHIZ Putative Isochorismatase family protein OS=Agrobacterium genomosp. 1 str. S56 OX=1183429 GN=AGR1B_Lc50122 PE=4 SV=1
MSKLEVLTPANSQLIFIDQQPQMAFGVQSIDRQTLKNNVVGLAKAAKIFNVPTTITTVETESFSGNTFPELLAVYPQNDILERTSMNSWDDQNVRDALAKNAANGRKKIVVSGLWTEVCNTTFALSALHDVPEYEIYMVADASGGTSSDAHKYAMDRMVQAGVIPVTWQQVLLEWQRDWARKETYDAVTTLVKEHSGAYGMGIDYAVTHVHGGAERVSHGKRIGPNPAK

SEQ ID NO: 92369 - protein, 230 aa, unidentified
  source 1..230: note = Agrobacterium salinitolerans
  REGION 1..230: note = tr|A0A1S7U9Q1|A0A1S7U9Q1_9RHIZ Putative Isochorismatase family protein OS=Agrobacterium salinitolerans str. Hayward 0363 OX=1183434; GN = AGR9A_Lc40533 PE=4 SV=1
MSKLEVLTPANSQLIFIDQQPQMAFGVQSIDRQTLKNNVVGLAKAAKIFNIPTTITTVETESFSGNTFPELLAVFPENDILERTSMNSWDDQNVRDALAKNAAAGRKKIVVSGLWTEVCNTTFALSALHDVADYEIYMVADASGGTSVDAHKYAMDRMVQAGVIPVTWQQVLLEWQRDWARKETYDAVTSLVKEHSGAYGMGIDYAVTHVHGGEERVKHGKRIGPNPAKK

SEQ ID NO: 92370 - protein, 229 aa, unidentified
  source 1..229: note = Agrobacterium sp.
  REGION 1..229: note = tr|A0A1S7SH86|A0A1S7SH86_9RHIZ Putative Isochorismatase family protein OS=Agrobacterium sp. NCPPB 925 OX=1631629 GN=AGR6A_Lc90581 PE=4 SV=1
MSKLEVLTPANSQLIFIDQQPQMAFGVQSIDRQTLKNNVVGLAKAAKIFNIPTTITTVETESFSGNTFPELLAVFPENDILERTSMNSWDDQNVRNSLAKNAAGGCKKIVVSGLWTEVCNTTFALSALHDVADYEIYMVADASGGTSLDAHRYAMDRMVQAGVIPVTWQQVLLEWQRDWARKETYDAVTSLVKEHSGAYGMGIDYAVTHVHGGAERIKHGKRIGPNPAK

SEQ ID NO: 92371 - protein, 230 aa, unidentified
  source 1..230: note = Agrobacterium tumefaciens
  REGION 1..230: note = tr|A0A1S7QSD3|A0A1S7QSD3_RHIRD Putative Isochorismatase family protein OS=Agrobacterium tumefaciens str. CFBP 5621 OX=1183422 GN=AGR4B_Lc30208; PE = 4 SV=1
MSKLEVLTPANSQLIFIDQQPQMAFGVQSIDRQTLKNNVVGLAKAAKIFNIPTTITTVETESFSGNTFPELLAVFPENDILERTSMNSWDDQNVRDALAKNAAGGRKKIVVSGLWTEVCNTTFALSALHDVADYEIYMVADASGGTSLDAHKYAMDRMVQAGIIPVTWQQVLLEWQRDWARKETYDAVTALVKEHSGAYGMGIDYAVTHVHGGEERVKHGKRIGPNPAKK

SEQ ID NO: 92372 - protein, 175 aa, Agrococcus casei
  REGION 1..175: note = tr|A0A1R4EZF2|A0A1R4EZF2_9MICO Isochorismatase; OS = Agrococcus casei LMG 22410 OX=1255656 GN=CZ674_01785; PE = 4 SV=1
MTTRHSGGERDNPVCEVNIEQLLARWRERSSSVVFVQHDSRNPESPLFPGSAGHAFKDALTGAPDLLVSKSVNSSFYGTPDLHAWLQHRGITQIAICGITTNHCCETTARMAGNLGYDVTFVIDATHTFGRAAPDGTVFTAQQLSAVTAANLHGEFATVQTTAEVLAKTPDSASL

SEQ ID NO: 92373 - protein, 204 aa, Alloactinosynnema sp.
  REGION 1..204: note = tr|A0A0H5CFM1|A0A0H5CFM1_9PSEU Isochorismatase; OS = Alloactinosynnema sp. L-07 OX=1653480 PE=4 SV=1
MTVTLDPKTTAVVLIEYQNDFTSEGGVLHGAVAGVMAETGMLGNTVAVVDAARKAGVTIMHAPITFADGYTEISAHPYGILKGVVDGNAFVKGGWGAAIVDDLAPHDGDIVVEGKRGLDTFASTNLDFMLRSKGITTIVLGGFLTNCCVESTMRSGYENGYRVITLTDCVAATSQAEHDNALTYDYPMFSLPVTSDEVIAALQN

SEQ ID NO: 92374 - protein, 184 aa, unidentified
  source 1..184: note = Alphaproteobacteria bacterium
  REGION 1..184: note = tr|A0A2S6R457|A0A2S6R457_9PROT Isochorismatase; OS = Alphaproteobacteria bacterium MarineAlpha10_Bin2; OX = 2013104 GN=dhbB PE=4 SV=1
MLLDAQRSVLIVIDLQEKLVPAIDKGDDVVANAGKLLEGAGRLGVPVIVSEQYPKGLGLTVDDIASKLPNESKTIAKLTFSAARSEDFRRDLSALRGRGRDQMVICGTETHVCVLQTVADLLAEDLPVYLVTDASGSRAEPNRRAGVERMAGLGAQCVTSEMVLFEWLEAAGSDDFKELSKLIK

SEQ ID NO: 92375 - protein, 80 aa, Amycolatopsis sp.
  REGION 1..80: note = tr|A0A178XGX8|A0A178XGX8_9PSEU Isochorismatase; OS = Amycolatopsis sp. M39 OX=1825094 GN=dhbB PE=4 SV=1
MSTPELTAEQVNADVAELLGCGLDELTPDTDLADLGLDSMRIMSLVEKWRGAGAAQLEFADLAEDPRLGHWTKLLTGGAQ

SEQ ID NO: 92376 - protein, 180 aa, unidentified
  source 1..180: note = Anaerostipes rhamnosivorans
  REGION 1..180: note = tr|A0A4V1EG80|A0A4V1EG80_9FIRM Isochorismatase; OS = Anaerostipes rhamnosivorans OX=1229621 GN=AR1Y2_1696; PE = 4 SV=1
MLIIDVQNDYFENVKCRLHQPEAALKAIQRLLKYFRDMNYQVYYIQHIAAKDAPFFVPNTEGVKSSENIKPLDTEKIIKKHYPNSFFETELQAELKKSSVTELTVCGMMTHMCVDTTVRAAKDLGYQVTLISDACATKDLEWQGEKIPAEIEQNVFLASLNQKFATIMTVEDLASEDLLI

SEQ ID NO: 92377 - protein, 180 aa, unidentified
  source 1..180: note = Anaerotignum neopropionicum
  REGION 1..180: note = tr|A0A136WEY3|A0A136WEY3_9FIRM Vibriobactin-specific isochorismatase OS=Anaerotignum neopropionicum OX=36847; GN = vibB PE=4 SV=1
MRICADDTAAVVIDFQEKLVPVISGKEEILRKSAILVQGLAEVGVPFVVSQQYTKGLGETVEELTGVIDSFHYMEKNTFSCFECEEIADWVKAQGKRTILVCGVEAHICVLQTVIDLLGADYRVFVVADCVGSRNPYDKEIGLERMRVEGAILTTCEAALFELTGGAKSPYFKAISKLVK

SEQ ID NO: 92378 - protein, 180 aa, unidentified
  source 1..180: note = Anaerotignum propionicum
  REGION 1..180: note = tr|A0A0X8V9P3|A0A0X8V9P3_ANAPI Vibriobactin-specific isochorismatase OS=Anaerotignum propionicum DSM 1682; OX = 991789 GN=vibB PE=4 SV=1
MRIYAEDTAALFIDFQEKLVPVINQNAEIVKKAVMLAQGLTEIGVPFAVSQQYTKGLGETVPEFSGAIESLQYMEKHTFSCFECEEIANWVKAQQKKTILICGVEAHICVLQTVLDLLDDGYRVFVVADCVGSRNPYDKEIGLERMKAEGAILTTCEAALFELTGGAKSPHFKVISKLVK

SEQ ID NO: 92379 - protein, 169 aa, Anoxybacillus flavithermus
  REGION 1..169: note = tr|A0A150LKG6|A0A150LKG6_9BACI Isochorismatase; OS = Anoxybacillus flavithermus OX=33934 GN=B4168_3633 PE=4; SV = 1
MEGHGRDQLIICGVYAHIGCLLTASDAFMQDIQVFFVADAVADFSLEHHKMALHYAASRCAFITPTQHLIEALKKEPVPDCQNILPMSLHDVRNQVAELIQESPADLSDHENLVNRGLDSIRMMSLVEKWRRAGAEVTFAALAARPTLFAWWNLLSSQSEKVLSAQDSQ

SEQ ID NO: 92380 - protein, 300 aa, Anoxybacillus sp.
  REGION 1..300: note = tr|A0A160F9R7|A0A160F9R7_9BACI Isochorismatase; OS = Anoxybacillus sp. B7M1 OX=1490057 GN=dhbB PE=4 SV=1
MGIPAIPAYPMPLLSELPKNKVLWTLDPKRAVLLIHDMQNYFLDAFTPNASPLVELVSHIQQIKQECKKLGVPVVYSAQPGGQVPEERGLLQDFWGKGMADDPYQKGIIDDLAPDADDIVLTKWRYSAFKKTNLSEILKEQGRDQLIICGVYAHIGCLLTASDAFMQDIQVFFVADAVADFSREQHQMAIQYAASRCAFTMSTQQLLGVLKRAQNPLPLSLEDVRRQVAELLQEEAADLSDQENLIDRGLDSIRIMSLVEKWRRAGAEVTFADLAARPTLSDWWNLLYFPREKVLSHQDS

SEQ ID NO: 92381 - protein, 219 aa, unidentified
  source 1..219: note = Aquimixticola soesokkakensis
  REGION 1..219: note = tr|A0A1Y5T6R9|A0A1Y5T6R9_9RHOB Isochorismatase; OS = Aquimixticola soesokkakensis OX=1519096 GN=dhbB_1 PE=4; SV = 1
MALPSIPDYALPTDLPAPRASFTLETDRAALLIHDMQRYFCAAFGPDALSRAGSTLARVTQNIAALAQAARAAGVPVFYTAQKGNQLLADRGLQADLWGKGMNAIPEHEDIIAALAPQPGDIQLVKHRYSAFQRSNLAELMRARGRDQLIVTGIYAHIGCLATVCEAFQRDIEPFFVADALADFSREKHDMALAWVAACAGVPMASDAVRTTLGDAACN

SEQ ID NO: 92382 - protein, 212 aa, Aquisphaera giovannonii
  REGION 1..212: note = tr|A0A5B9VUE3|A0A5B9VUE3_9BACT Isochorismatase; OS = Aquisphaera giovannonii OX=406548 GN=dhbB PE=4 SV=1
MSTKPSPRGDAASFRGRNEDLHGNAPDKSRTALLLIDVINDLEFPEGDQLLEHALPMADRIVELKRRAKAAGVPAVYVNDNFGRWQSNFQAQVEHCLRDGVRGRPIVERLVPEEDDYFVLKPKHSGFFSTTLDILLEYLGATSLILTGVAGNICVLFTANEAYMRDFTLFVPGDCVASNTADVNRYALDQMREVLKADTRPAAELDLAALAG

SEQ ID NO: 92383 - protein, 174 aa, Aquitalea magnusonii
  REGION 1..174: note = tr|A0A3G9GH79|A0A3G9GH79_9NEIS Isochorismatase; OS = Aquitalea magnusonii OX=332411 GN=DLM_3634 PE=4 SV=1
MPGTALLIVDMQCGVVAAQPAAVRLEQVLDSLQLAIAKARQRGFPVIFVQHEEAGLERSSAAWQLHPALPATAADHFIGKRHGDSFCDTELAGLLQSLEVSRLWLGGCATDFCVDSTLRNAVSRGFQVTVIRDGHTTLPAFALSGEQVIDHFNAVWQATKATPQPLRVQAATAL

SEQ ID NO: 92384 - protein, 217 aa, unidentified
  source 1..217: note = Archaeon sp.
  REGION 1..217: note = tr|A0A0B3AG19|A0A0B3AG19_ARCGX Isochorismatase hydrolase OS=Archaeon GW2011_AR5 OX=1579367; GN = QT00_C0002G0133 PE=4 SV=1
MKLNPKYLDPKKTAVIVVDLQNDFCHEISVLHRKRSRNKACALRVYKFIEEAGKAGVEVLFAQQIHDPRKLTWRQKKYYERVASGEREFGAYKGKLKIPCAMGTFGAEYFDYKPPKNKLFVKSGFDIWQNEQFKEFLDKHKIETLIITGVELTCCILYAVLGAEERGFNIVVPKDLVSGVDEGKRSQDNLLKIIGEMYAPVVNSEQILKIWTQKSGV

SEQ ID NO: 92385 - protein, 170 aa, unidentified
  source 1..170: note = Unknown
  REGION 1..170: note = tr|A0A4Y3FQF6|A0A4Y3FQF6_9ARCH Isochorismatase; OS = archaeon OX=1906665 GN=IPdc08_01914 PE=4 SV=1
MRTLLVIDMLRDFIYKDCVLPANGAKKLIPQINYKIIEFRERNEPIIFICDSHDEMDEEFDMWGRHAVEGTEGAEIIDELNRREYDIVVTKKRFSAFYNTDLEKILKGLNVDTLVITGVVTDICILHTAADATMRGFKVIVPENCVATVDEEKQKWGLRHIKEVLGGRID

SEQ ID NO: 92386 - protein, 185 aa, Arcobacter butzleri
  REGION 1..185: note = tr|E6L1N2|E6L1N2_9PROT Isochorismatase transposase; OS = Arcobacter butzleri JV22 OX=888827 GN=entB2 PE=4 SV=1
MKQTALLLVDFQNDYFSTFEGAKFELEGTEKASSNASKILEFFRKSEGKIIHIKHESAKGALFFEIETQGANIHKSVEPKEDEIVVTKNFPNSFKDTNLKEILDEINIKSLIIVGAMSHMCIDATTRAAKDFGYECTVISDATATRDLQFGDIVVPSKYVHASFMAALEFAYAKIKTTTEILKGF

SEQ ID NO: 92387 - protein, 196 aa, Asaia platycodi
  REGION 1..196: note = tr|A0A060QBZ5|A0A060QBZ5_9PROT Isochorismatase; OS = Asaia platycodi SF2.1 OX=1382230 GN=ASAP_0128 PE=4 SV=1
MSQTALVLIEFQNDFVSEGGALHDGVKAEIARTGMIDRTIALVNAARAKGVKIVWVPIEFAKGYPELASAPYGILAGVKATQAFQKGEWGARIIDALSPEGDDIVISGKRGLCSFASTNLDFVLRHNGITRVALGGFLTDCCVESTMRTAYELGYDVVTLTDCTATLSQAQHEAAIQYTYPMFSRPMTSEAFLATL

SEQ ID NO: 92388 - protein, 206 aa, unidentified
  source 1..206: note = Aspergillus niger
  REGION 1..206: note = tr|A2QYZ0|A2QYZ0_ASPNC Aspergillus niger contig An12c0080, genomic contig OS=Aspergillus niger (strain CBS 513.88 / FGSC A1513) OX=425011 GN=An12g03010 PE=4 SV=1
MATNGSINFGKNYAVLNLDWITVLIDAVEDTPEGQALIANYTKWNDAVHASSSRPLTVFSTLSFYPGQPEVQSGSPFANLIAPFGEFRHGSPETQIHKAFNVDSQDNVLPKTRWSATTGSVLEQILQAHGVKTVVISGVTLSGVVMATIYRLFDLDYNVYVIRENVLELPIEQHSAFASVMLDMLLPKMGIKVISVDEAINAVNSS

SEQ ID NO: 92389 - protein, 283 aa, unidentified
  source 1..283: note = Atlantibacter hermannii
  REGION 1..283: note = tr|A0A447LRS7|A0A447LRS7_ATLHE Isochorismatase; OS = Atlantibacter hermannii OX=565 GN=entB PE=4 SV=1
MAIPGLNAYTLPVAADIPDNKVQWDFEPTRAALLIHDMQDYFINFWGEACPMMAQVIANIAALRRYCKQQGIPVYYTAQPQNQSPEDRALLNDMWGPGLNNYPEQQKVVAQLTPDHDDTVLVKWRYSAFHRSPLEQALKASGRDQLLICGVYAHIGCMITATDAFMRDIQPFMVADALADFSREEHLMALKYVAGRAGRVVMTADLLPTPQSKAQLRALILPLLDETDEPEDDENLIDYGLDSVRMMALASRWRQVHPDIDFVMLAKKPTIDAWWALLSRDAR

SEQ ID NO: 92390 - protein, 223 aa, Azospirillum brasilense
  REGION 1..223: note = tr|G8AS63|G8AS63_AZOBR Putative Isochorismatase family protein OS=Azospirillum brasilense Sp245 OX=1064539; GN = AZOBR_p170030 PE=4 SV=1
MTITATATPGKLLVSPKDHALIMIDHQSQMAFATHSIDATTLRTNTALVAHAAAGFGVSTILTTVAEKSFSGPIFSEITEAFPGAEVTDRTSMNTWEDANVIKRVNGLGKTRLVFCGLWTSVCIVGPTLSALDQGFEVYVIADACGDVSVEAHQRAMDRMVQAGVRPMTSLQYMLELQRDWARTETYEMTTGIAKKYGGAYGLGIIYAKTMFGASEGGHSAAA

SEQ ID NO: 92391 - protein, 228 aa, Azospirillum lipoferum
  REGION 1..228: note = tr|G7ZDS6|G7ZDS6_AZOL4 Putative hydrolase, isochorismatase family protein OS=Azospirillum lipoferum (strain 4B) OX=862719 GN=ycaC PE=4 SV=1
MTFPAKSLINADDTVFLFIDHQPQMSFGVVNIDRQQLKNNTIALAKTAKLFGAPTILTAVETESFSGYIWPELMDVLKQDPIERTSMNSWDSEELVAAIKATGKKKLVIAALWTEACLLFPTLCAIEEGFEVYIVTDASGGTSQESHDAAIRRMEQAGAHSITSVNVLLELQRDWAKRGTYDGVMAIVREHFGAYGMGVDYAYTMVHKAPQRGEYPHKVIGAATHEHA

SEQ ID NO: 92392 - protein, 302 aa, Bacillus altitudinis
  REGION 1..302: note = tr|A0A5K1N8D0|A0A5K1N8D0_9BACI Isochorismatase; OS = Bacillus altitudinis OX=293387 GN=B4133_3883 PE=4 SV=1
MAIPTIPAYPMPSIHDLPENKVNWIPDPKRAVLLIHDMQQYFLNAFQQDTSPITELVQHIEQLRDTCKELGIPVVYTAQPGDQDPKDRALLTDFWGPGLGDDEALTKIIDQLAPSESDTMLTKWRYSAFKKSNFLDLLHEGGRDQLIITGVYAHIGCMLTAAEAFMLDIETFFVADAVADFSLKHHKMAMTYAAERCAVTTTTNQIIRRLTGQDADGDDLSFDAIVHQVAEYLQIEPNEIPLDENLVYLGLDSIRMMSLAEKWRQQGATVNFVELAAHPTLTHWRALLFPEKQPSIPNIDYL

SEQ ID NO: 92393 - protein, 103 aa, Bacillus amyloliquefaciens
  REGION 1..103: note = tr|I2CB40|I2CB40_BACAM Isochorismatase OS=Bacillus amyloliquefaciens Y2 OX=1126211 GN=ywoC PE=4 SV=1
MPDIGVKENDYTVTKRQWGAFFGTDLDLQLRRRGIDTIVLCGIATNIGVESTAREAFQLGYQQVFVTDAMATFSDEQHEATLKFIFPKIGRSRTTEEFIAQTK

SEQ ID NO: 92394 - protein, 295 aa, Bacillus anthracis
  REGION 1..295: note = tr|A0A0F7RI26|A0A0F7RI26_BACAN Isochorismatase; OS = Bacillus anthracis OX=1392 GN=dhbB PE=4 SV=1
MAIPSISVYKMPIESELPKNKVNWTPDPKRAVLLIHDMQEYFLDAYSDKESPKVELISNIKVIREKCKELGIPVVYTAQPGGQTLEQRGLLQDFWGDGIPAGPDKKKIVDELTPDEDDIFLTKWRYSAFKKTNLLEILNEQGRDQLIICGIYAHIGCLLTACEAFMDGIQPFFVADAVADFSLEHHKQALEYASNRCAVTTSTNSLLTELQGLKDDDEITLQKVHELVAQLLREPVESVGTDEDLLNRGLDSVRIMSLVEKWRREGKEITFADLAENPTVVDWYRLLSPQTEHVL

SEQ ID NO: 92395 - protein, 311 aa, Bacillus atrophaeus
  REGION 1..311: note = tr|A0A080UG79|A0A080UG79_BACAT Isochorismatase; OS = Bacillus atrophaeus OX=1452 GN=dhbB PE=4 SV=1
MAIPAISSYPMPSASDLPNNKVTWEPDPKRSVLLIHDMQNYFVDAFTAGTSPVVELVDNIRKLKSQCAELGIPVIYTAQPGAQAPEDRALLTDFWGPGLNDGPYEQEIVDELAPDDHDTVLTKWRYSAFKKTNLLDILRGKNRDQLIICGIYANIGCLLTACDAFMQDVEPFFVGDAVADFSLEQHRMSLEYAAGRCAVTISTLDLLEKLKTAPKSVSEPSSGSSSQLLTQQAVRQQIAELLQESPADIADTDDLIDRGLDSVRIMSLVEQWRRAGAEVTFVELAENPTLENWWRLLSSRSQKVLPNADYL

SEQ ID NO: 92396 - protein, 221 aa, Bacillus beveridgei
  REGION 1..221: note = tr|A0A1D7QWX2|A0A1D7QWX2_9BACI Isochorismatase; OS = Bacillus beveridgei OX=632773 GN=rutB PE=4 SV=1
MTTKVLVLIDLQKESNFGLFNLDRVISNSQKLIAACREQGIPIIYTRQINRMDGIGLSKGEPLKADGTPLYYADHTDQIEIIDDLKPHEGDIVIDKYRWSAFYETSLDVMLKSYGAEEVIMGGVVTDGCLMTSVFDAYFRDYEVHLVSDMVTASNRGAHQSAMLTMANWVYNLNIYRTDEMIKRLNGQPFERWRHEKTDDYQFTEGTLNQEFKRLTGDDLI

SEQ ID NO: 92397 - protein, 297 aa, Bacillus cereus
  REGION 1..297: note = tr|A0A158RTW8|A0A158RTW8_BACC3 Isochorismatase; OS = Bacillus cereus (strain 03BB102) OX=572264 GN=bacB PE=4; SV = 1
MAIPSISVYKMPIESELPKNKVNWTPDPKRAVLLIHDMQEYFLDAYSDKESPKVELISNIKVIREKCKELGIPVVYTAQPGGQTLEQRGLLQDFWGDGIPAGPDKKKIVDELSPNDDDIFLTKWRYSAFKKTNLLEILNEQGRDQLIICGIYAHIGCLLTACEAFMDGIEPFFVADAVADFSLGHHKQALEYASSRCAVTTSTHLLLKDLQSVKGDKSEGITLQEVHELVAQLLREPVESIETDEDLLNRGLDSVRIMSLVEKWRREGKEITFADLAENPTVVDWYRLLSPQTEHVL

SEQ ID NO: 92398 - protein, 185 aa, Bacillus clausii
  REGION 1..185: note = tr|Q5WJE7|Q5WJE7_BACSK Isochorismatase OS=Bacillus clausii (strain KSM-K16) OX=66692 GN=ABC0969 PE=4 SV=1
MKERCALLIIDMINPFDFDDADKLLPDAKNCAKAIANLKAILRAKEWPIIYVNDNYGDWQSEFTQVYNHIVNNRLPGAPIAKLLAPDTEDYSVLKPQFSGFFASPLDMLLRELNIQTLILTGVVGNMCVEFTANDAYMRDYQLLIPKDGFACFTEEEYDASLNHFTTVLKADVSSSKELQKRLNR

SEQ ID NO: 92399 - protein, 189 aa, Bacillus coagulans
  REGION 1..189: note = tr|A0A150K875|A0A150K875_BACCO Isochorismatase; OS = Bacillus coagulans OX=1398 GN=B4100_1166 PE=4 SV=1
MQNQSSKAALLVLDMQNGMVSRFAGNEAMLRPNQKAIESARAHHIPVIFVRLGFSKGYPEINQGHPTYARVAGYGDMTIFDEATQIHPSVQPLENEPVVTKYRVSAFSGSNLEMILKAQEIDTLILSGITTSGVVLSTLREAADKDYSLIVLRDACHDGNPDIHHMLMEKLFPVQAKVMTVSTWAGTLD

SEQ ID NO: 92400 - protein, 297 aa, unidentified
  source 1..297: note = Bacillus cytotoxicus
  REGION 1..297: note = tr|A7GPJ9|A7GPJ9_BACCN Isochorismatase OS=Bacillus cytotoxicus (strain DSM 22905 / CIP 110041 / 391-98 / NVH 391-98) OX=315749 GN=Bcer98_1757 PE=4 SV=1
MAIPAISIYKMPTESDLPMNKVTWKLDPKRAALLIHDMQEYFLDAYCDEESPKVELISNIQRIRQTCKGLHVPVIYTAQPGGQTLEQRGLLQDFWGAGIPEGPYKQKIVDELAPDDHDIFLTKWRYSAFKKTNLLEILHEQGRDQLIICGVYAHIGCLLTACEAFMDGIQPFFIADAVADFSFDHHRQAMQYASDRCAVTTTTNAVLTDFQRLKEESESAITLQMIREQVAQLLRESPADIANDENLLNRGLDSVRLMSLVEKWRQIGVEVTFADLAEHPTISDWFRMIASQKERVL

SEQ ID NO: 92401 - protein, 178 aa, Bacillus endophyticus
  REGION 1..178: note = tr|A0A3N6C9S4|A0A3N6C9S4_9BACI Isochorismatase; OS = Bacillus endophyticus OX=135735 GN=FH5_02401 PE=4 SV=1
MSKKTALLLLDVQNIMFSYEGGALWNEQQVLRNISFLLTKARQSNTTIIHIQHTDPSSNSMLSKGEFTWEIHRDVRPLPTEIIVQKSSWDAFYQTTLHNKLQEFGIRNLVIAGMQTEFCLDTTCRRAYSLGYKENILVKDAHSTFDTDVLSADKIVEHHNNILGGRFVTLKESREIMF

SEQ ID NO: 92402 - protein, 308 aa, unidentified
  source 1..308: note = Bacillus glycinifermentans
  REGION 1..308: note = tr|A0A1C3SKS6|A0A1C3SKS6_9BACI Isochorismatase; OS = Bacillus glycinifermentans OX=1664069 GN=dhbB PE=4 SV=1
MAIPAISPYKMPKASDLPKNKVSWTPHPKRAALLIHDMQQYFIDAYTRGESPMTELLPNINMLKERCKELGIPVIYTAQPGGQTPEERGLLQDFWGPGIPPGPDQQKIVEELKPDEGDTVLTKWRYNAFRKTDLLRLLQEQGRDQLIITGVYAHIGCLMTACDAFMQEIETFFVADAVADFSLQHHEMAISYAADRCAVTVTAEHLLNELKNGRNDDGVQEGRELLSKQTIREQIAALLLESPDDITDGENLIHRGLDSVRMMSLTERWRRAGAEVTFVELAEEPTIENWWRLLSSPKEPSLPNSDYQ

SEQ ID NO: 92403 - protein, 180 aa, Bacillus licheniformis
  REGION 1..180: note = tr|A0A447SA46|A0A447SA46_BACLI Isochorismatase hydrolase OS=Bacillus licheniformis OX=1402 GN=yaaI PE=4; SV = 1
MSNSALIIVDIINDFQFDMGDVLSKKTRNMTEHLLALKEHAAKKKWPIIYINDHFGIWQADIAAIIKKCKNDRSEYIIDRLAPNNNDYFLIKPKHSAFYGTALETLLNELHVDHLIITGIAGNICVLFTANDAYMREYDITIPHDCIASNNEKDNKYALTMMENVLFANITTAKEITAET

SEQ ID NO: 92404 - protein, 297 aa, Bacillus mycoides
  REGION 1..297: note = tr|A9VF23|A9VF23_BACMK Isochorismatase OS=Bacillus mycoides (strain KBAB4) OX=315730 GN=BcerKBAB4_2178 PE=4; SV = 1
MAIPSISVYKMPIESELPKNKVNWTPNPKRAVLLIHDMQEYFLDAYSDTESPKVELISNIKVIRERCKELGIPVVYTAQPGGQTLEQRGLLQDFWGDGIPAGPDKKKIVDELTPDEDDIFLTKWRYSAFKKTNLLEILNEQGRDQLIICGIYAHIGCLLTACEAFMDGIQPFFVADAVADFSLEHHKQALQYASNRCAVTTSTNLLLKDLQSLKGDESEGITLQEVHELVAQLLRESVESIEVDEDLLNRGLDSVRIMSLVEKWRREGKGITFADLAERPTVDDWYRLLSSQAAQVL

SEQ ID NO: 92405 - protein, 295 aa, unidentified
  source 1..295: note = Bacillus paranthracis
  REGION 1..295: note = tr|A0A1J9Y0E2|A0A1J9Y0E2_9BACI Isochorismatase; OS = Bacillus paranthracis OX=2026186 GN=dhbB PE=4 SV=1
MAIPSISVYKMPIESELPKNKVDWKPDPKRAVLLIHDMQEYFLDAYSDKESPKVELISNIKVIREKCKELGIPVVYTAQPGGQTLEQRGLLQDFWGDGIPAGPDKKKIVDELTPDEDDIFLTKWRYSAFKKTNLLEILNEQGRDQLIICGIYAHIGCLLTACEAFMDGIQPFFVADAVADFSLEHHKQALEYASNRCAVTTSTNSLLTELQGLKDDDEITLQKVHELVAQLLREPVESVGTDEDLLNRGLDSVRIMSLVEKWRREGKEITFADLAENPTVVDWHRLLSLQTERVL

SEQ ID NO: 92406 - protein, 302 aa, Bacillus pumilus
  REGION 1..302: note = tr|A0A498U5T4|A0A498U5T4_BACPU Isochorismatase; OS = Bacillus pumilus OX=1408 GN=dhbB PE=4 SV=1
MAIPTIPAYPMPSTQDLPENKVNWIPDPKRAVLLIHDMQQYFLNAFQQDTSPITELVQHIEQLRDTCNELGIPVVYTAQPGDQDPKDRALLTDFWGPGLGDDEALTKIIDQLAPSEADTMLTKWRYSAFKKSNFLDILQEGGRDQLIITGVYAHIGCMLTAAEAFMLDIETFFVADAVADFSLKHHKMAMTYAAERCAVTTTTNQIISRLTGQEANSDDLSFEAIVHQVAEYLQIEPNEIPLDENLVYLGLDSIRMMSLAEKWRQQGATVNFVELAANPTLAHWRTLLFPEKQPSIPNIDYL

SEQ ID NO: 92407 - protein, 302 aa, Bacillus safensis
  REGION 1..302: note = tr|A0A5C0WGQ4|A0A5C0WGQ4_9BACI Isochorismatase; OS = Bacillus safensis OX=561879 GN=dhbB PE=4 SV=1
MAIPTIPAYTMPSTQDLPKNKVNWIPDPKRAVLLIHDMQQYFLNAFQQDTSPITELVQHIEQLRNTCNELGIPVVYTAQPGDQDPKDRALLTDFWGPGLGDDEALTKIIDQLAPSEADTMLTKWRYSAFKKSNFLDILQEGGRDQLIITGVYAHIGCMLTAAEAFMLDIETFFVADAVADFSLKHHKMAMTYAAERCAVTTTTNQIISHLTGQEANSDDLSFEAIVHQVAEYLQMEPNEIPLDENLVYLGLDSIRMMSLAEKWRQQGATVNFVELAANPTLTHWRTLLFPEKQPSIPNIDYL

SEQ ID NO: 92408 - protein, 190 aa, Bacillus selenatarsenatis
  REGION 1..190: note = tr|A0A0A8X616|A0A0A8X616_9BACI Isochorismatase; OS = Bacillus selenatarsenatis SF-1 OX=1321606; GN = SAMD00020551_2877 PE=4 SV=1
MNNLLELPGLLILDVQKGFDDSYWGTRNNPEAEGNMARLLTEWRNRKGHVIYTKHLSLDPASPLHHRNKLGTEFKEIIQPMDGEIVFTKNVNSGFIGTELEAYLKQKQIKSVVITGLSTQHCVSTTTRMSGNLGFNTFLVSDAIAAFEITDHKGVRHTAASIQENELAMLQKEFATIITTNEIISQFKQQ

SEQ ID NO: 92409 - protein, 174 aa, Bacillus smithii
  REGION 1..174: note = tr|A0A0H4NZM1|A0A0H4NZM1_9BACI Isochorismatase; OS = Bacillus smithii OX=1479 GN=BSM4216_2023 PE=4 SV=1
MKQALIVIDVQEIFFKLPQNLLYNSVQLVNNISRLIDQAHEKNTPVIFIQHTSQDERDDLFEGKDTWKLHENLNIRHTDKIIQKTTWDSFYQTELLDYLKDNEIEQLIFAGAQTEFCMDTTIRAAFSLGFQNNLLFKNTHSTVNNAILDAHTIIKHHENIWNNRFLTIVEWDKE

SEQ ID NO: 92410 - protein, 295 aa, Bacillus sp.
  REGION 1..295: note = tr|A0A4Y7QTA1|A0A4Y7QTA1_9BACI Isochorismatase; OS = Bacillus sp. BH2 OX=2528958 GN=dhbB PE=4 SV=1
MAIPSISVYKMPIESELPKNKVNWTPDPKRAVLLIHDMQEYFLDAYSDKESPKVELISNIKMIREKCNNLGIPVVYTAQPGGQTLEQRGLLQDFWGDGIPAGPDKKKIVDELTPNEDDIFLTKWRYSAFKKTNLLEILNEQGRDQLIICGIYAHIGCLLTACEAFMDGIQPFFVADAVADFSLEHHKQALEYASNRCAVTTSTNSLLTELQGLKDDDEITLQKVHELVAQLLREPVESVGTDEDLLNRGLDSVRIMSLVEKWRREGKEITFADLAENPTVVDWYRLLSLQTEHVL

SEQ ID NO: 92411 - protein, 185 aa, Bacillus sporothermodurans
  REGION 1..185: note = tr|A0A150LGY0|A0A150LGY0_9BACI Isochorismatase; OS = Bacillus sporothermodurans OX=46224 GN=B4102_0176 PE=4; SV = 1
MNQTLLIIDAQQQLIDGNENESAVFNKEQLISNINLVIEKARESNVPVVFIRDIDVAEGKGEGFQVHNAINVPSDSKIFDKAATNCFHGTGLLSHLRSQAIEHIVIMGCATQHCIDSAVRTATITGFDVTLVGDGHSTTDNDSLSAEQILKHHNRTLHGHYNVEHFSMVRNAEEDLFHPTHDSYR

SEQ ID NO: 92412 - protein, 312 aa, Bacillus subtilis
  REGION 1..312: note = sp|P45743|DHBB_BACSU Isochorismatase OS=Bacillus subtilis (strain 168) OX=224308 GN=dhbB PE=1 SV=1
MAIPAIQPYQMPTASDMPQNKVSWVPDPNRAVLLIHDMQNYFVDAFTAGASPVTELSANIRKLKNQCVQLGIPVVYTAQPGSQNPDDRALLTDFWGPGLNSGPYEEKIITELAPEDDDLVLTKWRYSAFKRTNLLEMMRKEGRDQLIITGIYAHIGCLVTACEAFMEDIKAFFVGDAVADFSLEKHQMALEYAAGRCAFTVMTDSLLDQLQNAPADVQKTSANTGKKNVFTCENIRKQIAELLQETPEDITDQEDLLDRGLDSVRIMTLVEQWRREGAEVTFVELAERPTIEEWQKLLTTRSQQVLPNADYL

SEQ ID NO: 92413 - protein, 311 aa, Bacillus tequilensis
  REGION 1..311: note = tr|A0A2X0X1M7|A0A2X0X1M7_9BACI Isochorismatase; OS = Bacillus tequilensis OX=227866 GN=dhbB PE=4 SV=1
MAIPAIQPYQMPTASDMPQNKVSWVPDPNRAVLLIHDMQNYFVDAFTAGASPVTELSANIRTLKDQCAQLGIPVVYTAQPGSQNPADRALLTDFWGPGLNSGPYEEKIITELAPDDDDLVLTKWRYSAFKRTNLLEMMRKEGRDQLIISGIYAHIGCLVTACEAFMEDIEAFFVGDAVADFSLEKHQMALDYAAGRCAFTVMTDSLLDQLKNAPADTPKTSANTGKEVFTYEKIRKQIVELLQETPEDITDQEDLLERGLDSVRIMTLVEQWRREGAEVTFVELAERPTIEDWQKLLTTRSRQVLPNADYL

SEQ ID NO: 92414 - protein, 197 aa, Bacillus thuringiensis
  REGION 1..197: note = tr|A0R910|A0R910_BACAH Isochorismatase OS=Bacillus thuringiensis (strain Al Hakam) OX=412694 GN=BALH_0302; PE = 4 SV=1
MNMKLEEDKYMKTALLLVDIQNDYFPHGKMELRNPAEASAYASQLLQLFRKKNEPIFHIQHISIKEDATFFLPNTEGVHIHESVRPLREESVILKHYPNSFRETDLLKQLQRLAIEHVVICGMMTHMCIDATVRAAFDFGLQCTVIHDACATKDLSFKNATIPAVYIHNTILASLNGVYANVMSTEEFLATKKHSLQ

SEQ ID NO: 92415 - protein, 308 aa, unidentified
  source 1..308: note = Bacillus velezensis
  REGION 1..308: note = tr|S6FP83|S6FP83_9BACI Isochorismatase OS=Bacillus velezensis UCMB5033 OX=1338518 GN=dhbB PE=4 SV=1
MAIPSIPAYALPTASDMPENKVSWTLNPKRAVLLIHDMQNYFVDAFAKGEAPITEASQNIKKIKEQCKALGIPVVYTAQPGSQDPADRALLTDFWGPGLKSGPYEEKVIPELAPDDQDIVLTKWRYSAFKRTNLLEIMHESGRDQLMITGIYAHIGCLVTACEAFMDDIQSFFIGDAVADFSSEKHKMAIEYASQRCAYTALTNEVLELLGGAPVSGGEEKVSAVLTKDRVREQIAAILQESPSDIPDHEDLLDRGLDSVRIMSLVEQWRRDGAEVTFVELAENPTLEEWWRLLSSRSQKVLPNADYL

SEQ ID NO: 92416 - protein, 297 aa, unidentified
  source 1..297: note = Bacillus wiedmannii
  REGION 1..297: note = tr|A0A0G8BYV4|A0A0G8BYV4_9BACI Isochorismatase; OS = Bacillus wiedmannii OX=1890302 GN=B4147_1999 PE=4 SV=1
MAIPSISVYKMPVESELPKNKVNWIPDPKRAVLLIHDMQEYFLDAYSDKESPKVELISNIKVIREKCKELGIPVVYTAQPGGQTLEQRGLLQDFWGDGIPAGPDKKKIVGELTPDEDDIFLTKWRYSAFKKTNLLEILNEQGRDQLIICGIYAHIGCLLTACEAFMDGIEPFFVADAVADFSLDHHKQALEYASNRCAVTTSTNLLLKDLQSVKSDESEGITLQEVHELVAQLLREPVESIDIDEDLLNRGLDSVRIMSLVEKWRREGKEITFADLAERPTVSDWYSLLSSQTAQVL

SEQ ID NO: 92417 - protein, 189 aa, unidentified
  source 1..189: note = Unknown
  REGION 1..189: note = tr|A0A1V6ACL8|A0A1V6ACL8_9BACT Putative isochorismatase OS=bacterium ADurb.Bin157 OX=1866935; GN = phzD PE=4 SV=1
MRHSDILTRDGSVLLICDVQKKCIKPIYKKEAMINNIKSLVSFAGLTGLPVLLTELSPQRFGTTIDEIKGLVPRLEPIKRTKYSCFGNEELTLRLESMNTNRLIVLGMETHISICPTVLDAITRGYSVHVVLNATSAARKVNWKVAIEKMRRAGAVITTADIVMHELMGGTDHPKYEQCLELTKKISDL

SEQ ID NO: 92418 - protein, 186 aa, unidentified
  source 1..186: note = Unknown
  REGION 1..186: note = tr|A0A1V5V2T9|A0A1V5V2T9_9BACT Isochorismatase; OS = bacterium ADurb.Bin236 OX=1866925 GN=entB PE=4 SV=1
MEKDAYGRITKEDSVLLIIDVQEKFVPHIRNIDEVIANCARMASGCRALGVPVIVTEQYPEGLGRTVPEVQEAIGDTAIMEKTAFSVFADPAISSEIEKLGRPNLMLAGVEAHVCLIKTALDALAAGYSVHWIDDAISSRTKGNVRAARDRACRCGAFPSSAEMALFQLISSSKDEHFRAISKLVK

SEQ ID NO: 92419 - protein, 216 aa, unidentified
  source 1..216: note = Unknown
  REGION 1..216: note = tr|A0A1V5P5G3|A0A1V5P5G3_9BACT Isochorismatase; OS = bacterium ADurb.Bin363 OX=1866927 GN=entB PE=4 SV=1
MYRDKLTEWMKEVKIFHRNPGKVEPSRTALLIIDMENYFASPDGNSYLSDTKFILPSIKKLLHYFREKKLPVIYTAHQHIDPKIDGGLLSTWWGSFIEEGTYHAKIYEELTPLPEERIIKKRRYNAFYQTELELVLRGMDIKNLVITGVMTNLCCETTAREAFQRDFMVFFIADGNCTANDEMHISSLKNLAFGFAHVLTAEDMLKLIKNYDKKNN

SEQ ID NO: 92420 - protein, 188 aa, unidentified
  source 1..188: note = Unknown
  REGION 1..188: note = tr|A0A1V5NH85|A0A1V5NH85_9BACT Vibriobactin-specific isochorismatase OS=bacterium ADurb.Bin374 OX=1866937; GN = vibB PE=4 SV=1
MRHPDILTREGAVLLITDVQKKCIKPIYRKEPMINNIKTLVSYAGMIGLPILLTELAPQTFGGTIEEIKKLMPRLEPIKRSRYSAFGSEDLTLRLEAMNTNTLVVVGMETHVSVCQTVLDALTRGFRVHVVLDASSSRRKVDWKVSLEKMRRAGAIVTTMELVMHEMIERVDVPQFDKFQELLSNIGR

SEQ ID NO: 92421 - protein, 189 aa, unidentified
  source 1..189: note = Unknown
  REGION 1..189: note = tr|A0A2H6EJ49|A0A2H6EJ49_9BACT Putative isochorismatase OS=bacterium BMS3Abin04 OX=2005712 GN=phzD; PE = 4 SV=1
MSDNIRRNPKILNSKKSALLVIDIQERILTVERKKERVIENTIKLIQGCKVLNVPIYFTEQYPKGLGPTHPDIKNELEAVEAIQKMSFSCYGAGDLFEEFMSKNISQIIVCGIETHVCVQQTVLDLIVNNFQVNLAADAVSSRKKIDYKIALERMRNNGAEITTAESILFEMLNVCGTPEFKEVSKIVK

SEQ ID NO: 92422 - protein, 174 aa, unidentified
  source 1..174: note = Unknown
  REGION 1..174: note = tr|A0A2H6F185|A0A2H6F185_9BACT Isochorismatase; OS = bacterium BMS3Abin06 OX=2005714 GN=entB PE=4 SV=1
MSGEELLIIDMLNDFVLEGAPLEVPDTRKVIPVIKKEIEDTKTRGNPVIYICDAHDKDDKEFSKFGWPVHAVDGTRGAEVADEIKPDKDDIVIKKTTYSGFYNTKLEETLKGLGAAGVRLTGCVTHICILFTASDAVLRDYRVTVVENGVAGLEREDHEAAIRIMKNVLGANII

SEQ ID NO: 92423 - protein, 174 aa, unidentified; identical to SEQ ID NO: 92422
  source 1..174: note = Unknown
  REGION 1..174: note = tr|A0A2H6F8N2|A0A2H6F8N2_9BACT Isochorismatase; OS = bacterium BMS3Abin07 OX=2005715 GN=entB PE=4 SV=1

SEQ ID NO: 92424 - protein, 197 aa, unidentified
  source 1..197: note = Unknown
  REGION 1..197: note = tr|A0A2H5WN78|A0A2H5WN78_9BACT Vibriobactin-specific isochorismatase OS=bacterium HR14 OX=2035409 GN=vibB PE=4; SV = 1
MASELILSKERSALVVVDMQETFLEPIKVRGLIERNIQLLMQIAQQLGVPALATTQNAEKLGGMVPALQEVPGVPVFNKLCFSCWQEEVFAKALQESGCQQVLLTGVEAHICVMQTALDLIEAGYQVHIPYDAVASRNKRDWKYALYRLQSGGAIITSVESAIYEWLRAAGTEEFRQVLPLLKAHMSPQRESSEETE

SEQ ID NO: 92425 - protein, 201 aa, unidentified
  source 1..201: note = Unknown
  REGION 1..201: note = tr|A0A2H5WWY1|A0A2H5WWY1_9BACT Vibriobactin-specific isochorismatase OS=bacterium HR15 OX=2035410 GN=vibB PE=4; SV = 1
MERSDLLLRRERSVLVVVDMQEPFLRMIKVRDLIVQNIAFLLQATRLLGIPVLATLQNRERIGEIVPPLQALLPEQVMPIDKLCFSCLGAEPFAKALQETGRQQVVLTGIEAHICIMQTALDLLKAGHQVYVPYDAVASRGKPDWKYALLRLQHAGVIITSVESVTYEWLDQAGTEMFRQLLPLIKERDQFLKKRKESVDE

SEQ ID NO: 92426 - protein, 185 aa, unidentified
  source 1..185: note = Unknown
  REGION 1..185: note = tr|A0A2H5Z5V4|A0A2H5Z5V4_9BACT Isochorismatase; OS = bacterium HR28 OX=2035423 GN=dhbB PE=4 SV=1
MKSAVLVIDMLNDFVTGKLGNERVRTVIEPIRRLLERARAAGVPVIYVGDAHLPSDPEMAVWGPHAMKGTKEAETIPELAPQPGDVVLEKRTYSAFYETGLDLLLRSLGVDTVVITGLHTNICCRHTAADAFTHGYRIVVPEDCVNAFTEEEHKEGIAYLKRVYGAQITTSEELAREWATERQST

SEQ ID NO: 92427 - protein, 191 aa, unidentified
  source 1..191: note = Unknown
  REGION 1..191: note = tr|A0A2H6AH75|A0A2H6AH75_9BACT Vibriobactin-specific isochorismatase OS=bacterium HR36 OX=2035431 GN=vibB PE=4; SV = 1
MRHPTLLDRNQTAILVVDVQEKLLPLIAARPSLLRNIRFLLQVARLLQLPIQATEQYPKGLGSTTPELAELLPPRPEKLDFSCCGLPEVVEQFRNWQRRQVIVAGIETHVCVLQTVLDLLAHGFQVHVPVDAVAARFELDHQVALQRMLEAGAVLTTVESAGFELLQRAGSPEFKEFSRLVQQRAKDLQNI

SEQ ID NO: 92428 - protein, 184 aa, unidentified
  source 1..184: note = Unknown
  REGION 1..184: note = tr|A0A2H6ANZ5|A0A2H6ANZ5_9BACT Putative isochorismatase OS=bacterium HR37 OX=2035432 GN=phzD PE=4; SV = 1
MNFPNKSQALLVVIDMQEKLMNAIPSAEREPLIKNAETLIESAKTFGIPIIVTEQYPKGLGSTIEEIKEKLGEYFNPIEKVVFSCARALEFKSILTAQKKQDIVLCGIETHVCVLQTAVDLLKEGYNVFVPVDAVASRKRLDWEVGIKLIEKAGAIAGTVETFLFQMLEQAGTDEFKRISKLIK

SEQ ID NO: 92429 - protein, 196 aa, unidentified
  source 1..196: note = Unknown
  REGION 1..196: note = tr|A0A2H6B713|A0A2H6B713_9BACT Putative isochorismatase OS=bacterium HR41 OX=2035436 GN=phzD PE=4; SV = 1
MSEGSNQLGAASGGGDRHARALLDPQRAALIVVDVQEAFAKAVGDFDAVAAAARKLVRGAHIVGLPVIVSEQYPRGLGPTVAELAELLDSDVRIEKRCFAASAAEGFDLSGRTQAIVCGIEAHVCVAQTVLELLARGVAVHLVVDAIASRKENDRDVAVRRLERAGAVPQTVESALFELIRGADHPQFKAIQELIK

SEQ ID NO: 92430 - protein, 185 aa, unidentified
  source 1..185: note = Bacteroidales bacterium
  REGION 1..185: note = tr|U5Q7Y8|U5Q7Y8_9BACT Isochorismatase; OS = Bacteroidales bacterium CF OX=1400053 GN=BRDCF_p1931; PE = 4 SV=1
MNNMRAGLLLIDIQNDYFDKGAMTLVNPEEACANAKRILERFRSEKLPVIFIQHIAANPAATFFLPGTAGAEIYPSIQPVEGEKVIVKHFPNSFRDTDLMDYLRKSNITDLVICGMMTHMCVDATTRAAKDLGYNITLIGDACATRNLEIHGEIVSASDVQNSFLAALNYFYSSVKSTSQYLNKE

SEQ ID NO: 92431 - protein, 180 aa, unidentified
  source 1..180: note = Bacteroidetes bacterium
  REGION 1..180: note = tr|A0A1V6CQD5|A0A1V6CQD5_9BACT Putative isochorismatase OS=Bacteroidetes bacterium ADurb.Bin123; OX = 1852804 GN=phzD PE=4 SV=1
MRIDKEHTACLVIDIQEKIFRVMAGKEEFLKNCTTLIRGMIILEIPVLVTQQYTKGLGDTIPEIRICIPDFHYTEKRKFSCCDEPSVMQHLYASGIENVILCGIESHVCVLQTAVDLKGAGMHPIVVMDAVTSRTENSAGLARERFRHEGIMMTSAESILFELTRSSAAPEFREISKLVK

SEQ ID NO: 92432 - protein, 179 aa, unidentified
  source 1..179: note = Betaproteobacteria bacterium
  REGION 1..179: note = tr|A0A1V5QWT9|A0A1V5QWT9_9PROT Vibriobactin-specific isochorismatase OS=Betaproteobacteria bacterium ADurb.Bin341 OX=1852821 GN=vibB PE=4 SV=1
MFTQQESALVLIDIQGKLAESMQEREALFDNLVRLTRSAALLQLPILWVEQSPEKMGRTIAPLAELLSGHEAIAKTSFSCCGEPAFMQALKQSGRRQLILTGIECHVCVFQTAANLLAAGYEVQTVADAVSSRTLANRQIGLERMRALGAQITSTEMLLFELMKTANHPQFRDIAKLVR

SEQ ID NO: 92433 - protein, 207 aa, Blastochloris viridis
  REGION 1..207: note = tr|A0A0P0J372|A0A0P0J372_BLAVI Putative isochorismatase OS=Blastochloris viridis OX=1079 GN=phzD_1; PE = 4 SV=1
MSAIPSLISYPLPSGSSLPANITHWKVDMERAVLLIHDMQRYFVGFFDDRMRYLLINNIKILRQVLVSHKVPIAYSAQPGGMNDTERGLLKDFWGPGMKVAPEDRNVVDELRPEPGDWILTKWRYSAFFRSDLLARMKAARRDQIILCGVYAHVGVIATAVDAFSNDIKPFLVADATADFSEDFHRSTLTYAAQRCAHVTTVEEVLP

SEQ ID NO: 92434 - protein, 180 aa, unidentified
  source 1..180: note = Bordetella ansorpii
  REGION 1..180: note = tr|A0A157S5N9|A0A157S5N9_9BORD Isochorismatase; OS = Bordetella ansorpii OX=288768 GN=ycaC_1 PE=4 SV=1
MPAISLKASDCTLLVIDMQARLLPAIHDGEAVLAATLKLARAARLLDIPVVGTEQQPGKLGATVPELAGALQAVLAKTHFSAAREPGFEAWLPPGRRTVLVAGVEAHVCVLQTLLDLRQRGWQVALVSDAVGSRRPSDHHAASRRARAGGADIVSAEMAIFEWMETCEHPRFREVLRLVK

SEQ ID NO: 92435 - protein, 179 aa, Bordetella pertussis
  REGION 1..179: note = tr|A0A0T7CTT4|A0A0T7CTT4_BORP1 Isochorismatase; OS = Bordetella pertussis (strain ATCC 9797 / DSM 5571 / NCTC 10739 / 18323) OX=568706 GN=BN118_3654 PE=4 SV=1
MSALLQANQATLLIVDMQGRLMPAIHDGQAVLAAAHKPAQAARLLDVPVVATEHHARMLGVTVAPLDTQIQARFPKMHFSATREPGFTAWLPPARKTILVAGCEAHICVLQTVLGLLEEGYRALLVSDAAGSRKPADHHAALRRARGAGAEIVTTEMAIFEWMETCEHPKFRDVLRLVK

SEQ ID NO: 92436 - protein, 177 aa, Bordetella trematum
  REGION 1..177: note = tr|A0A157S8B9|A0A157S8B9_9BORD Isochorismatase; OS = Bordetella trematum OX=123899 GN=ycaC_1 PE=4 SV=1
MLLQAEQCSLLIIDMQERLMPVIDQGEAVLAANCKLAQAARLLEVPVLATEHHVRALGTTLAPLRDSIDATFQKMAFGAMREPGFEAWLPASRRTLVVTGCEAHVCVLQTVLGLREHGWQVALVADAAGSRKPADHHAALRRMRAAGAQIVTSEMVMFEWMQTCEHPRFREVLRLVK

SEQ ID NO: 92437 - protein, 183 aa, Bosea sp.
  REGION 1..183: note = tr|A0A1E1UY35|A0A1E1UY35_9BRAD Isochorismatase; OS = Bosea sp. BIWAKO-01 OX=506668 GN=BIWAKO_01116 PE=4 SV=1
MSALVIIDVQRDILAVPGAARAVVGERFAKVRERLAELIGRAHAADRPVIFIQHDGPAGHRLETGTRGWELHPDLPRQPGDIVVHKTACDSFHDTALQVVLAERRIGHLVIAGLMTQYCVDTTCRRAVSLGFDVTLVADAHTTADSGTLQVEQIVAHHNALLDGFDAGSATIRVKPLAQVAFT

SEQ ID NO: 92438 - protein, 207 aa, unidentified
  source 1..207: note = Bradyrhizobiaceae bacterium
  REGION 1..207: note = tr|F7QFT8|F7QFT8_9BRAD Isochorismatase; OS = Bradyrhizobiaceae bacterium SG-6C OX=709797; GN = CSIRO_0311 PE=4 SV=1
MAAAPKSLLQIAGAPLNPSPLDKSALVIVDAQLEYTKGGLPLDGVDNAILEAAKLLKLARERGVPVFHIVQHAPAGRPLFAEDGPYAAIVPLLAPAAGEVVVRKALPNSFAGTDLDALVKSTGRTELILAGFMTHMCVSATARAALDLRYRTTIVANATATRDLPDPLGGTIPASIVHRVALTELADRFAIVVKDTAELTAATKAVA

SEQ ID NO: 92439 - protein, 216 aa, Bradyrhizobium sp.
  REGION 1..216: note = tr|A5EN11|A5EN11_BRASB Putative Isochorismatase family protein OS=Bradyrhizobium sp. (strain BTAi1 / ATCC BAA-1182) OX=288000 GN=BBta_5596 PE=4 SV=1
MSKLEMLTPQNCAVALIDYQPAMYQGVQSHDRLGVFNNIQIVAKAAKLFKIPTVLTTVAKDSFSGPFMPEVTELFPDHDIVDRTAMNSWLDAGFRKQVAATGRKKFIIAGLWTEACVLFPTLDMLREGYEIYIPADACGDLSLEAHNRAMDRAVQAGAVPITSCQFAFELQQDWARAETYDGMMEILKAHSPYGIQIRFSKWALGEHASEGGAKVA

SEQ ID NO: 92440 - protein, 207 aa, unidentified
  source 1..207: note = Brenneria goodwinii
  REGION 1..207: note = tr|A0A0G4JZN5|A0A0G4JZN5_9GAMM Isochorismatase of siderophore biosynthesis OS=Brenneria goodwinii OX=1109412; GN = BN1221_03837 PE=4 SV=1
MAIPSLNVYDMPESHDFPANKVSWDFAPDRAVLLIHDMQDYFVQFYDRQSPLIQQLIENIAVLRHYCKSQRIPVVYSAQPNNQSPQDRALLNDMWGPGLNQYPDLQPVVGRLCPDDDDIVLVKWRYSAFHRTSLEEKMKAWGRDQLVICGVYGHIGCMITATDAFMRDIKAFLVGDAIADFSRRDHMMALNYVATRSGQVVSVADLV

SEQ ID NO: 92441 - protein, 292 aa, Brenneria sp.
  REGION 1..292: note = tr|G7LSL5|G7LSL5_9GAMM Isochorismatase OS=Brenneria sp. EniD312 OX=598467 GN=BrE312_3953 PE=4 SV=1
MSIPKLNSYPLPSADALPDNKVNWPLETARAALLIHDMQRYFLNFWGENSPLTARLIDNIARLKKFCRQHGIPVFYTAQPNNQSAADRALLNDMWGPGLNNYPEQQNITDALTPEGADTVLVKWRYSAFLRTDLEQRLRDAGRDQLIICGVYAHIGCLTTANDAFMRDIKPFMVADALADFSLEEHMMALRYGAGRCARVVATDQLVADEPAAQGYGKFRLRAELLPLLDEDCGEVDDDENLLDYGLDSVRIMSLAARWRQQGHDVDFVALVKRPTITHWLTLLAQPQREEA

SEQ ID NO: 92442 - protein, 181 aa, Brevibacillus laterosporus
  REGION 1..181: note = tr|H0U651|H0U651_BRELA Isochorismatase family protein OS=Brevibacillus laterosporus GI-9 OX=1118154; GN = BLGI_839 PE=4 SV=1
MIDKTALVIVDTQSIITYHSYHGEEIVDKISSLQAKARQLNVPVLFIQHIGPAGSPFEEGAHMTEIHPNVAPLEGEIVIKKTACDAFYETALHQELLNRGIEHLIIVGFQTQFCIDTACRSAVSHGYEVTLVGDCHSTANTPTLNAISIIDHHNETLNGLGTQHHNITVKDSSEIFASEPR

SEQ ID NO: 92443 - protein, 194 aa, Brevibacterium aurantiacum
  REGION 1..194: note = tr|A0A1D7W8U0|A0A1D7W8U0_9MICO Isochorismatase; OS = Brevibacterium aurantiacum OX=273384 GN=BLSMQ_3726 PE=4; SV = 1
MSTSTSTHQPPLASQREKTALIVIDVQNGVFVENWHADEVIGTISDLVQRARDTGAEVIWVRHSSGELPLESPQWQIVDALSPADDETIVEKTHGNTFEDTDFEDVLASKDVGHLVVTGAQSDACVRSTIHGGFARGYDVTLVSDAHTTEDLSDWGAPPPEQVVSHTNLYWGFESGPGRTARVQESAEVDFTAP

SEQ ID NO: 92444 - protein, 207 aa, Brevibacterium casei
  REGION 1..207: note = tr|A0A449DB56|A0A449DB56_9MICO Probable isochorismatase OS=Brevibacterium casei OX=33889 GN=phzD; PE = 4 SV=1
MEHTFTTSPYAQVTAADVKMRGPGWALDWTRAALLVHDMQEYFVRALPSQPSQQLQGNVGQLVRLARGHGAPVIYSGQRGGMTPEERGLMTDFWGPGMEADEEDRRLVDSAEPTKDDPRITKWRYSAFTRTHLAELLSEFGKDQLIVCGIYLHVGILATAIDCVAKDIRCFVIGDATADFNRTLHIDTLEYIGDRCGQIKFIGSDLI

SEQ ID NO: 92445 - protein, 215 aa, Brevundimonas diminuta
  REGION 1..215: note = tr|A0A1R4G8B9|A0A1R4G8B9_BREDI Isochorismatase of siderophore biosynthesis OS=Brevundimonas diminuta 3F5N; OX = 1255603 GN=FM111_10445 PE=4 SV=1
MSVSKGLPTVPAYALPTEAEIPASRAQWTLQRDRAALLVHDMQRYFMRPYAPGAEPLPGLIANIARLIVAARAAGAPVFYTAQHGDQDRRDRGLQADLWGPGMSRAPEHEEILPELAPAPGDFPLVKHRYSAFQRSNLETLMRVRGRDQLIVCGVYAHIGCQLTAADAFQRDIEPFFVADALGDFSRDKHMGAVAWAADTCAVALSTARVLERLT

SEQ ID NO: 92446 - protein, 87 aa, Brevundimonas vancanneytii
  REGION 1..87: note = tr|A0A4P1KBY5|A0A4P1KBY5_9CAUL Isochorismatase; OS = Brevundimonas vancanneytii OX=1325724 GN=dhbB_1 PE=4; SV = 1
MTKLTPQDLTLERMRADVAAVLHETPDSILDDDNLMDLGVDSLRALNLSLAWSEAVPLEFSELAEHTTLAGWWSVVQARLRAAGHDA

SEQ ID NO: 92447 - protein, 166 aa, Brochothrix thermosphacta
  REGION 1..166: note = tr|A0A2X0QJW8|A0A2X0QJW8_BROTH Isochorismatase; OS = Brochothrix thermosphacta OX=2756 GN=BTBSAS_30162 PE=4; SV = 1
MKPLADALIIIDLQNGVCYNDTEIFNLSSLVTLINKRMLDYTSQGKNIIIVQHTDEDLIQGQSPWEVIPSLDKGKATHYIQKTHANSFYTTNLKELLEQEHINSIEICGAQTEYCVDATVKNAHALGYLIQMLRGGTTTYSNAFMSAENTVRFYENIWDNRFATFI

SEQ ID NO: 92448 - protein, 290 aa, unidentified
  source 1..290: note = Brucella abortus
  REGION 1..290: note = tr|Q2YL96|Q2YL96_BRUA2 Isochorismatase hydrolase family:Isochorismatase:Phosphopantetheine attachment site:Phosphopantetheine-binding domain OS=Brucella abortus (str ain 2308) OX=359391 GN=BAB2_0013 PE=4 SV=1
MAIPKIADYPMPQKAGFPANKTNWQPDPARAVLLIHDMQRYFLRFYDANGPLMGDLIGNLVRLRNWAHENGVPVVYTAQPHEQPAGDRALLNDMWGPGLPAAAPEQQLIVDKLTPGATDTVLAKWRYSAFQRSDLLQRMKDWNRDQLIIGGIYAHIGCMVTAIDAFMNDIQPFMVGDAVADFSEEEHRLALKYVATRCGAVIDTASLIRKPATETTRDWLQKRVLELIEDETELDPQENLILYGLDSLQVMKLSAELKERGVAVGFDDLARVPTLAAWWDLIETKQKAAA

SEQ ID NO: 92449 - protein, 290 aa, Brucella melitensis; identical to SEQ ID NO: 92448
  REGION 1..290: note = tr|Q7CNT0|Q7CNT0_BRUME Isochorismatase OS=Brucella melitensis biotype 1 (strain 16M / ATCC 23456 / NCTC 10094) OX=224914 GN=BMEII0079 PE=4 SV=1

SEQ ID NO: 92450 - protein, 290 aa, unidentified; identical to SEQ ID NO: 92448
  source 1..290: note = Brucella neotomae
  REGION 1..290: note = tr|A0A381BZP4|A0A381BZP4_BRUNE Enterobactin isochorismatase OS=Brucella neotomae OX=29460 GN=entB PE=4; SV = 1

SEQ ID NO: 92451 - protein, 290 aa, unidentified; identical to SEQ ID NO: 92448
  source 1..290: note = Brucella ovis
  REGION 1..290: note = tr|A0A0H3AVX8|A0A0H3AVX8_BRUO2 Isochorismatase; OS = Brucella ovis (strain ATCC 25840 / 63/290 / NCTC 10512); OX = 444178 GN=entB PE=4 SV=1

SEQ ID NO: 92452 - protein, 290 aa, Brucella sp.
  REGION 1..290: note = tr|E2PLR4|E2PLR4_9RHIZ Isochorismatase OS=Brucella sp. BO2 OX=693750 GN=BIBO2_0997 PE=4 SV=1
MAIPKIADYPMPQKAGFPANKTNWQPDPARAVLLIHDMQRYFLRFYDANGPLMGDLIGNLVRLRNWAQENGVPVVYTAQPHEQPAGDRALLNDMWGPGLPAAAPEQQLIVDKLTPSTTDTVLAKWRYSAFQRSDLLQRMKDWNRDQLIIGGIYAHIGCMVTAIDAFMNDIQPFMVGDAVADFSEEEHRLALKYVATRCGAVIDTASLIGKPATETTRDWLQKRVLELIEDETELDPQENLILYGLDSLQVMKLSAELKERGVAVGFDDLARVPTLAAWWDLIETKQKAAA

SEQ ID NO: 92453 - protein, 291 aa, Burkholderia ambifaria
  REGION 1..291: note = tr|Q0BF28|Q0BF28_BURCM Isochorismatase; OS = Burkholderia ambifaria (strain ATCC BAA-244 / AMMD); OX = 339670 GN=Bamb_1688 PE=4 SV=1
MAIPKIASYPMPAELPANRVNWRFDPHRAALLVHDMQDYFLDFYDRAAAPVPTLVAHVRRLIDFARAAGMPVYYTAQPATQAAADRALLTDMWGPGLTAQPSRAAICDALAPASGDTVLDKWRYSAFRRSPLETCLREQARDQLAICGIYAHIGCLMTACDAFMRDVQPFFVADALADFSEREHRMALDYVAGRCGMAVTTDALVGVAPADDSAPMLVAIAAQVARSLRIPAADLREHDNLIDCGLDSIRMMTLVEQWRAQGYDVTFVQLAEQPTLGAWTQVLQRAAQVSA

SEQ ID NO: 92454 - protein, 187 aa, Burkholderia cenocepacia
  REGION 1..187: note = tr|A0A107L5U2|A0A107L5U2_9BURK Hydrolase; OS = Burkholderia cenocepacia OX=95486 GN=yecD_4 PE=4 SV=1
MSATRLDTNTALVVIDLQKGIVALPTAHPVAPVIARTRELLDAFRSRGLPVVLVNVAGGAPGRTEQAPRTAQLPADWTELVPELNRQPTDHVVTKQTWGAFTGTGLDAHLKAAGVTQIVLTGVATSIGVESTARQAHELGYNVTLAVDAMTDLNADAHVNSVERLFPRLGETGTTQDIVALLDRRGA

SEQ ID NO: 92455 - protein, 187 aa, Burkholderia cepacia
  REGION 1..187: note = tr|A0A2X2PCN9|A0A2X2PCN9_BURCE Isochorismatase family protein OS=Burkholderia cepacia OX=292 GN=yecD_3; PE = 4 SV=1
MSATRLDTNTALVVIDLQKGIVALPTAHPVAPVIAHARELLDAFRSRGLPVVLVNVAGGAPGRTEQSPPVAQLPADWTELVPELNRQPSDHVVTKRTWGAFTGTGLDAHLKAAGVTQIVLAGVATSIGVESTARQAHELGYNVTLAIDAMTDLKADAHVNSVERLFPRLGETGTTQDIVALLDRRGA

SEQ ID NO: 92456 - protein, 187 aa, Burkholderia lata
  REGION 1..187: note = tr|Q397H5|Q397H5_BURL3 Isochorismatase hydrolase; OS = Burkholderia lata (strain ATCC 17760 / DSM 23089 / LMG 22485 / NCIMB 9086 / R18194 / 383) OX=482957 GN=Bcep18194_ B1272 PE=4 SV=1
MSATRLDTNTALVVIDLQKGIVALPTAHPVEPVIAHTRTLLDAFRSRGLPVVLVNVAGGAPGRTQQQVRLDALPADWAELVPELNRQPGDHVVTKKTWGAFTGTDLDAHLKAAGVTQIVLTGIATSIGVESTARQAHELGYNVTLAIDAMTDLNADAHVNSVERLFPRLGETGTTQDIVALLDRRGE

SEQ ID NO: 92457 - protein, 187 aa, Burkholderia multivorans
  REGION 1..187: note = tr|A0A0H3KMJ9|A0A0H3KMJ9_BURM1 Isochorismatase; OS = Burkholderia multivorans (strain ATCC 17616 / 249); OX = 395019 GN=BMULJ_04433 PE=4 SV=1
MSATRLDTNTALVVIDLQKGIVALPTAHPVGGVIERTRELLDAFRSRGLPVVLVNVAGGAPGRTQQQVRLDALPADWTELIDELDRRPGDHLVTKKTWGAFTGTDLDAYLKAAGVTQIVLAGVATSIGVESTARQAHELGYNVTLAVDAMTDLNADAHANSVERLFPRLGETGSTQDIVALLDRRGA

SEQ ID NO: 92458 - protein, 187 aa, Burkholderia plantarii
  REGION 1..187: note = tr|A0A0B6S510|A0A0B6S510_9BURK Putative isochorismatase OS=Burkholderia plantarii OX=41899; GN = BGL_2c02690 PE=4 SV=1
MTVTTLDPKTALIVVDLQKGIVALPVAHQPTAVVERSVRLLDAFRERGLPVVLVNVAGMAPGRNEQPHRGGELPPDWADLLPELKQQADDILVTKRTWCGFTNTGLDAKLKAAGVTQVVLCGIATSIGVESTARLAYQLGYHVTLAVDAMTDLHADAHANSIARIFPRLGETGTTDDIIALLDTRNA

SEQ ID NO: 92459 - protein, 200 aa, Burkholderia pseudomallei
  REGION 1..200: note = tr|Q3JJ31|Q3JJ31_BURP1 Isochorismatase; OS = Burkholderia pseudomallei (strain 1710b) OX=320372; GN = entB PE=4 SV=1
MRPIDMSIPTLNPTVALVAIDLQNGIVSLPVVPQSGSEVVAKTAELANAFRARKLPVIFVHTSYQPDGAVALKVKTDVPPSPPNLDPEWSAFAPALGVQPLDVVVTKHQWGAFTGTDLDVQLRRRGITDIVLTGIATNVGVESTAREAYENNYNVVIVSDAVSTWSTDAQTFALTQIFPKLGQVATAADVEAALETQQQR

SEQ ID NO: 92460 - protein, 185 aa, unidentified
  source 1..185: note = Burkholderia singularis
  REGION 1..185: note = tr|A0A238H9T1|A0A238H9T1_9BURK Isochorismatase; OS = Burkholderia singularis OX=1503053 GN=BSIN_4728 PE=4; SV = 1
MKGAAVLVIDMQRGLLQGARPAHALGEIVAGINRLTAAARAAHAPVCFVQHDGEPDDGDDIAPGTPGWELHADLVRAPADWSIRKRVSDAFQDTPLAAGLDRHGISHVILCGYATQFCVDATARRAALIGYRTTVVADLHTTCDWPHLSAAQIITHHNLTWKNCTYSGNGVVPRPLDDVLAMEFA

SEQ ID NO: 92461 - protein, 84 aa, unidentified
  source 1..84: note = Burkholderiales bacterium
  REGION 1..84: note = tr|A0A433SGK5|A0A433SGK5_9BURK Isochorismatase; OS = Burkholderiales bacterium CNM695-12 OX=1965230 GN=dhbB; PE = 4 SV=1
MTTTPSPILTLERMREDIAKVLHEDASEIRDDDNLIDLGLDSIRAMTLLTRWREAGAHIDFADMAQRPELGYWWRLVRDGLPQN

SEQ ID NO: 92462 - protein, 284 aa, Buttiauxella agrestis
  REGION 1..284: note = tr|A0A085GIG0|A0A085GIG0_9ENTR Isochorismatase; OS = Buttiauxella agrestis ATCC 33320 OX=1006004 GN=entB; PE = 4 SV=1
MAIPKLNAYTLPTAADIPENKVNWAFEPERAALLIHDMQEYFIDFWGDNCPMIQQVIANIAVLRDYCKRHNIPVYYTAQPNAQSDEDRALLNDMWGPGLNKHPERQKVVAELAPDEHDTVLTKWRYSAFVRSPLEQVLKETGRNQLIICGVYAHIGCMTTATDAFMRDIKPFMVADALADFSREEHMMALKYTAGRSGRVVMTRDLLPEAAPQNKEQLRELVLPLLDESDIPQDDENLIDYGLDSVRMMALAARWRKIHTDIDFVMLAKNPTIDAWWALLSRGS

SEQ ID NO: 92463 - protein, 286 aa, Buttiauxella brennerae
  REGION 1..286: note = tr|A0A1B7IVR6|A0A1B7IVR6_9ENTR Isochorismatase; OS = Buttiauxella brennerae ATCC 51605 OX=1354251; GN = M975_0512 PE=4 SV=1
MAIPKLNAYTLPTAADIPENKVNWAFEPERAALLIHDMQEYFIDFWGDNCPMIQQVIANIAALRDYCKRHNIPVYYTAQPNGQSDEDRALLNDMWGPGLNKHPERQKVVAELAPDEHDTVLTKWRYSAFIRSPLEQALKETGRNQLIICGVYAHIGCMTTATDAFMRDIKPFMVADALADFSREEHMMALKYTAGRSGRVVMTRDLLPESAPQNKQQLREIVLPLLDESDIPEDDENLIDYGLDSVRMMALAARWRKIHADIDFVMLAKNPTIDAWWALLSREAQA

SEQ ID NO: 92464 - protein, 286 aa, Buttiauxella gaviniae
  REGION 1..286: note = tr|A0A1B7HRK9|A0A1B7HRK9_9ENTR Isochorismatase; OS = Buttiauxella gaviniae ATCC 51604 OX=1354253; GN = M977_03213 PE=4 SV=1
MAIPKLNAYTLPTAADIPENKVSWALEPERAALLIHDMQEYFIDFWGDNCPMIQQVIANIAALRDYCKRHNIPVYYTAQPNAQSDEDRALLNDMWGPGLNKYPERQKVVAELAPDEHDTVLTKWRYSAFIRSPLEQALKETGRNQLIICGVYAHIGCMTTATDAFMRDIKPFMVADALADFSREEHMMALKYTAGRSGRVVMTRDLLPESAPQNKQQLREIVLPLLDESDIPEDDENLIDYGLDSVRMMALAARWRKIHADIDFVMLAKNPTIDAWWVLLSREVAA

SEQ ID NO: 92465 - protein, 286 aa, Buttiauxella noackiae
  REGION 1..286: note = tr|A0A1B7I114|A0A1B7I114_9ENTR Isochorismatase; OS = Buttiauxella noackiae ATCC 51607 OX=1354255; GN = M979_0229 PE=4 SV=1
MAIPKLNAYTLPTAADIPENKVNWAFEPERAALLIHDMQEYFIDFWGDNCPMIQQVIANIAALRDYCKRHNIPVYYTAQPNAQSDEDRALLNDMWGPGLNKHPERQKVVAELAPDENDTVLTKWRYSAFIRSPLEQSLKDTGRNQLIICGVYAHIGCMTTATDAFMRDIKPFMVADALADFSREEHMMALKYTAGRSGRVVMTRDLLPEAAPQNKQQLREIVLPLLDESDIPEDDENLIDYGLDSVRMMALAARWRKIHADIDFVMLAKKPTIDAWWVLLSREVQA

SEQ ID NO: 92466 - protein, 196 aa, unidentified
  source 1..196: note = Caldiarchaeum subterraneum
  REGION 1..196: note = tr|E6N938|E6N938_CALS0 Isochorismatase; OS = Caldiarchaeum subterraneum OX=311458 GN=CSUB_C1612 PE=4; SV = 1
MAGESIPEPVKVRLHRGNTAVIVVDMQNDFCKPSGKLFVPASVETIPKIGQVLEKARQSDVMIVYTQDWHMKDDPEFAIWGEHALEGSWGAEIVDELRPRAGDVVVKKLRYDAFYGTSLDHILRLRQIENIVVTGTVANICVLHTAGSAALRWYKVYLPIDCVSALNDFDYRATLRQVSFLYRGILTRSELLEFEK

SEQ ID NO: 92467 - protein, 231 aa, unidentified
  source 1..231: note = Unknown
  REGION 1..231: note = tr|A0A1V5FMG3|A0A1V5FMG3_9BACT Isochorismatase; OS = candidate division BRC1 bacterium ADurb.BinA292; OX = 1852824 GN=dhbB PE=4 SV=1
MTDHPAPACSPAIPGGAELNPDTTALVIVDMMNRFCDPAWLGRHDDAAQVAWYRRELEGIIPRIRSVLESFRRRGALVVHVVLARWTPDAREVVPYQRGREYDAFDTQAMSVIPELAPATGEIVIRKVASSAFQATGLDFMLRNAGIRQVVITGQFGDACCFYTLIMSREAGFANIWVHDALLFSNEQMKQTINPLVAGRWAESLSAEELVRRLEPSRAAAAPIPSLARKA

SEQ ID NO: 92468 - protein, 174 aa, Burkholderia sp.
  REGION 1..174: note = tr|A0A0L0MEH8|A0A0L0MEH8_9BURK Isochorismatase; OS = Candidatus Burkholderia verschuerenii OX=242163; GN = BVER_00701 PE=4 SV=1
MARADTLVVIDMQAKLVPHIDDGERVTQRVAAIVRAAGLLDVPVVATEQNPRGLGATVDGLLDGRHRLIEKDSFDATRANAFLAALPPAPGTLWIAGAEAHVCVLLTAIGLLARGYRVEWLADAVGSRRAADRATANLRAQQEGARLTTVETAIFSWLGDFRHPRFREALALIK

SEQ ID NO: 92469 - protein, 215 aa, unidentified
  source 1..215: note = Heimdallarchaeota sp.
  REGION 1..215: note = tr|A0A1Q9PG04|A0A1Q9PG04_9ARCH Isochorismatase; OS = Candidatus Heimdallarchaeota archaeon AB_125 OX=1841596; GN = dhbB PE=4 SV=1
MQKELYLTKENQEEKVSQWITECKKMKKHIAFAFDLSKAALLVLDMQNFFLDESKHAYVPSAKTITEDISKLVDFFQKNERPVIFTKHLDTQKPDEMMTRWWKDSIEDGTPEAEISNLLNTEGSEIIKKSRYSAFEKTNLEELLHNKGVKQIIITGIMSHLCCETTARDAFMKDFEVIYIVDATATYTEKLHLGTIRAISHGFGRCESTEEIVNG

SEQ ID NO: 92470 - protein, 181 aa, unidentified
  source 1..181: note = Hydrogenedentes sp.
  REGION 1..181: note = tr|A0A1V6EP52|A0A1V6EP52_9BACT Putative isochorismatase OS=Candidatus Hydrogenedentes bacterium ADurb.Bin101 OX=1852847 GN=phzD PE=4 SV=1
MLVKENSVVVVIDIQDVLMPKSEEVARAYIAQAAKLIRVARALDIPVVVTEQNPERLGGTHATIRDALGEVPALPKLEFGCMANPGFREALARTGRKQMLLIGMETHVCVMQTALEAMASGYEVFLVRDAVVSARKPDYKAGIHRMIQEGVTCVCCEMVIFEWLRKAGTPEFRQVLPLIKS

SEQ ID NO: 92471 - protein, 95 aa, unidentified
  source 1..95: note = Micropelagos sp.
  REGION 1..95: note = tr|U2XUD0|U2XUD0_9PROT Isochorismatase protein; OS = Candidatus Micropelagos thuwalensis OX=1397666; GN = RS24_01319 PE=4 SV=1
MNLTNSEEPPKIQKEEVPTTSNSDKEGSFKELEDNNRHKTTMWTETWLRRTMVGLWMIGIIVCFFAEVCLIYLMIKYTVYVGSDNEILEKFMGLA

SEQ ID NO: 92472 - protein, 208 aa, unidentified
  source 1..208: note = Protochlamydia sp.
  REGION 1..208: note = tr|A0A0U5JDM2|A0A0U5JDM2_9BACT Isochorismatase family hydrolase OS=Candidatus Protochlamydia naegleriophila OX=389348 GN=PNK_1646 PE=4 SV=1
MASFKYKRLDKNDAAVLLVDHQSGLINMIQDYSPSEFKNNVLALANIAKFFNLPTILTTSFENGPNGPLVPELKEILPNAAYIPRPGQINAWDNEDFVRAVKATGKKQLIIAGVVTDVCVAFPTLSAIEDGYDVFVVVDASGTFNQAVRDAALMRVTHAGAQLMNWFSVACELHRDWRNDIEGLGTLLASHLPAYRNLITSYIAKSKS

SEQ ID NO: 92473 - protein, 225 aa, Rhodobacter sp.
  REGION 1..225: note = tr|A0A0J9EB09|A0A0J9EB09_9RHOB Isochorismatase; OS = Candidatus Rhodobacter lobularis OX=1675527; GN = AIOL_000111 PE=4 SV=1
MPAIESTPYAWPYNGDLRPQNTALIVIDMQTDFCGKGGYVDAMGYDLSMTQAPIEPIKAVLAAMRAKGYHIIHTREGHRPDLSDLPANKRWRSQQIGAGIGDPGPCGKILIRGEAGWDIIPELYPEQGEIIIDKPGKGSFCATDLEMILRTRGIENLIICGITTDVCVSTTMREANDRGFECVVLSDCCGATDKGNHDAALKMVTMQGGVFGAVADSKTLIAGLV

SEQ ID NO: 92474 - protein, 179 aa, Capnocytophaga sp.
  REGION 1..179: note = tr|F1ZRP0|F1ZRP0_9FLAO Isochorismatase; OS = Capnocytophaga sp. oral taxon 338 str. F0234 OX=888059; GN = HMPREF9071_1491 PE=4 SV=1
MLSVNDTQLVILDIQGKLSQIVYKSEEILRQSHLLIQGCKLLNIPIIWVEQTPEKLGDTNSIIATSLSELSPIKKYTFSAYRNKDFAERVKANLRPQILLIGIETHICIYQTAYDLVNAGYEVFVVADAVSSRTVENRNIGLQMIIQTQGKIISVEGALFSLLKDSQHEKFRDIAKLIK

SEQ ID NO: 92475 - protein, 189 aa, Castellaniella defragrans
  REGION 1..189: note = tr|W8X002|W8X002_CASDE Isochorismatase; OS = Castellaniella defragrans 65Phen OX=1437824; GN = BN940_14666 PE=4 SV=1
MEDAMKYVDVNQALLTAGTSALLIVDMQEKLLPAIRDTDALCGRVARLAQAARLLSVPVWATEHWPGKIGPTHPELLAHVDRVVTKTHFDACREAGFLADWPAGRTRVLLTGTEAHICVLQTGLGLAQAGFQPVLVADGAGSRRESDWAAACERWRHHGLETVTSEMAIYEWLETPAHPAFRDVLALVK

SEQ ID NO: 92476 - protein, 201 aa, Catenulispora acidiphila
  REGION 1..201: note = tr|C7PW82|C7PW82_CATAD Isochorismatase; OS = Catenulispora acidiphila (strain DSM 44928 / NRRL B-24433 / NBRC 102108 / JCM 14897) OX=479433 GN=Caci_4467; PE = 4 SV=1
MSASGIEPIEPYRLPAEGELPVQRVAWTPEPGRAVLLIHDMREHFLRFFPAGRDPLATLVANTVRLREACAAAGIPVVFAAQPGGEELEPDRAIVPELAPRPGDKVLTKRRHSAFHRTPPADVLWQTGRDQVIVCGVYAHIGCLTSCVEAFSRDVQAFLVADAVADFSPEKHRAALMLAAEVCAMTPTTDQLLRALAEAAR

SEQ ID NO: 92477 - protein, 214 aa, unidentified
  source 1..214: note = Chlorobi bacterium
  REGION 1..214: note = tr|A0A136K8R3|A0A136K8R3_9BACT Isochorismatase; OS = Chlorobi bacterium OLB4 OX=1617411 GN=entB PE=4 SV=1
MLKENYFNRDNSIEKIKLWQTEFSGFSKKFKKFSVIDSALIVIDMQNFFLDEKSHAFVPSSEIIVNHINRLISFYDKKNLPVIFTYFAVAPGDDDPILRRWGNSVSENSYNSIIPESVLRNSNHKVIRKNTYDSFYRTNLEEALNALNVKQLVITGVLTNLCCETTARSAFVRNFDVFIGIDCTAAFNEEMHVASLRNLMYGFASPVTINEITT

SEQ ID NO: 92478 - protein, 179 aa, unidentified
  source 1..179: note = Chloroflexi bacterium
  REGION 1..179: note = tr|A0A1V6DC93|A0A1V6DC93_9CHLR Vibriobactin-specific isochorismatase OS=Chloroflexi bacterium ADurb.Bin120; OX = 1852856 GN=vibB PE=4 SV=1
MLNTEESVLVLVDFQERLAEIVLRRELVVPNALRLIKGCQALGVPILPTLQVPEKLGPMPPELVEVLGDVKVISKAVFSALREPDFLLALRQSGRNQVLLTGIEAHVCVLQTGLDLLDAGYQVHAISDAVFSRTAENQQVALARLHDAGATVSSVEIALFELIRTSTHPQFKTISTLIK

SEQ ID NO: 92479 - protein, 169 aa, Chondromyces crocatus
  REGION 1..169: note = tr|A0A0K1E9W7|A0A0K1E9W7_CHOCO Isochorismatase; OS = Chondromyces crocatus OX=52 GN=entB PE=4 SV=1
MKLGLLVIDMQNEFFADGSPATPSLHAAVEYINGAIALFRKAEAPVVIVSDVEEPRVPGTEAFALHPSIAARPDDLRIDKRSGNAFWKTDLDRQLRDRGVDMLILCGFCAEFCVLDTFRGAREWGWPAALLRGGIASPHPDRIRLVQEICDVVSYGALEGWMGLLHKPS

SEQ ID NO: 92480 - protein, 292 aa, Chromobacterium violaceum
  REGION 1..292: note = tr|Q7NXZ3|Q7NXZ3_CHRVO Isochorismatase; OS = Chromobacterium violaceum (strain ATCC 12472 / DSM 30191 / JCM 1249 / NBRC 12614 / NCIMB 9131 / NCTC 9757); OX = 243365 GN=ent B PE=4 SV=1
MSIPKLNAYPLPQAADFPANKTAWRVDPKRAALLIHDMQRYFLAFYGEDSALVNELVSKVEALRRWADSHGVPVIYTAQPTEQKPEDRALLNDMWGPGLTTADPAVQAVTPRLAPRERDTVLVKWRYSAFQRSDLQEKMKAWGRDQLVICGVYAHIGCMMTACDAFMRDIQAFMVGDAVADFSEEEHKMALRYVATRCGAVIAQSDLAAAGGDAALTREWLKAQVLTVLEDGDDSLAGDDNLLDYGLDSIRVMELVAQWQKLGLEIGFEDLAQDLTLDGWWTAIQAKLPQEA

SEQ ID NO: 92481 - protein, 75 aa, Citreicella sp.
  REGION 1..75: note = tr|D0DCJ8|D0DCJ8_9RHOB Vibriobactin-specific isochorismatase OS=Citreicella sp. SE45 OX=501479; GN = CSE45_4535 PE=4 SV=1
MTLSLDRMRADIAAALDIGPDEVATDEHLGDLGLDSIALMRLLMGWEELQPTLPSERLYECETLDEFWAIARAAQ

SEQ ID NO: 92482 - protein, 285 aa, Citrobacter amalonaticus
  REGION 1..285: note = tr|A0A381G4H2|A0A381G4H2_CITAM Isochorismatase; OS = Citrobacter amalonaticus OX=35703 GN=entB PE=4 SV=1
MAIPKLQAYALPTALDIPVNKVNWTFEPDRAALLIHDMQDYFVSFWGENCPMMEQVIANIAALRNYCKAHNIPVYYTAQPKDQSDEDRALLNDMWGPGLTRSPEQQKVVAALAPDEADNVLVKWRYSAFHRSPLELMLKETGRDQLIITGVYAHIGCMTTATDAFMRDIKPFMVADALADFSREEHLMSLKYVAGRSGRVVMTQELLPAPVPTSKDELRALILPLLDESDEPMDDENLIDYGLDSVRMMALAARWRKVHGDIDFVMLAKNPTIDAWWALLSREVR

SEQ ID NO: 92483 - protein, 285 aa, Citrobacter freundii
  REGION 1..285: note = tr|A0A336QJJ6|A0A336QJJ6_CITFR Isochorismatase; OS = Citrobacter freundii OX=546 GN=entB PE=4 SV=1
MAIPKLQAYALPTALDVPVNKVDWAFDPERAALLIHDMQDYFIGFWGDNCPMMEQVVANIAALRQYCKEHNIPVYYTAQPKEQSDEDRALLNDMWGPGLTRSPEQQKIVEALAPDEADTILVKWRYSAFHRSPLEQMLKETGRNQLIITGVYAHIGCMTTATDAFMRDIKPFMVADALADFSRDEHLMSLKYVAGRAGRVVMTQELLPTPVPASKDALRSVILPLLDESEEPMDDENLIDYGLDSVRMMALAARWRKVHGDIDFVMLAKNPTIDAWWTLLSREVK

SEQ ID NO: 92484 - protein, 135 aa, Citrobacter koseri
  REGION 1..135: note = tr|A0A2X2UXN1|A0A2X2UXN1_CITKO Isochorismatase; OS = Citrobacter koseri OX=545 GN=entB_2 PE=4 SV=1
MAGVTFTDLKEKERWQFRNCRRTRCLARLDIPPNKVNWAFEPERAALLIHDMQDVFCQLLGDNCPMMEQVIANIAALRQYCKEHNIPVYYTAQPKDQSDEDRALLNDMWGPGLTRSPSSKRLSMRWRRTRRTPCW

SEQ ID NO: 92485 - protein, 286 aa, unidentified
  source 1..286: note = Citrobacter pasteurii
  REGION 1..286: note = tr|A0A0A1RCW4|A0A0A1RCW4_9ENTR Isochorismatase [enterobactin] siderophore / Apo-aryl carrier domain of EntB OS=Citrobacter pasteurii OX=1563222 PE=4 SV=1
MAIPKLQAYALPTALDVPANKVDWAFEPERAALLIHDMQDYFIGFWGENCPMMEQVVANIAALRQYCKAHNIPVYYTAQPKEQSDEDRALLNDMWGPGLTRSPEQQKIVDALAPDEADTILVKWRYSAFHRSPLEQMLRDTGRNQLIITGVYAHIGCMTTATDAFMRDIKPFMVADALADFSRDEHLMSLKYVAGRSGRVVMTQELLPTPVPDSKDALRGVILPLLDESEEPMDDENLIDYGLDSVRMMALAARWRKVHGDIDFVMLAKNPTIEAWWKLLSREVKS

SEQ ID NO: 92486 - protein, 285 aa, Citrobacter rodentium
  REGION 1..285: note = tr|D2TMN4|D2TMN4_CITRI Isochorismatase; OS = Citrobacter rodentium (strain ICC168) OX=637910 GN=entB; PE = 4 SV=1
MAIPKLQAYALPDAQDIPTNKVSWAFDPERAALLIHDMQDYFVSFWGENCPMMEQVIANIAALRDYCKAHHIPVYYTAQPKAQSDEDRALLNDMWGPGLTRSPEQQKVVESLTPDEADTVLVKWRYSAFHRSPLEQMLKETGRNQLIITGVYAHIGCMTTATDAFMRDIKPFMVADALADFSREEHLMALNYVAGRAGRVVMTQDLLPAPVPASKEDLRALILPLLDESEEPMDDENLIDYGLDSVRMMALAARWRKVHGDIDFVMLAKNPTIDGWWKLLSREVK

SEQ ID NO: 92487 - protein, 285 aa, Citrobacter youngae
  REGION 1..285: note = tr|D4BCN0|D4BCN0_9ENTR Isochorismatase; OS = Citrobacter youngae ATCC 29220 OX=500640 GN=entB PE=4; SV = 1
MAIPKLQAYALPTALDVPANKVDWAFEPERAALLIHDMQDYFIGFWGDNCPMMEQVVANIAALRQFCKEHNIPVYYTAQPKEQSDEDRALLNDMWGPGLTRSPEQQKIVEALAPDEADTLLVKWRYSAFHRSPLEQMLKDTGRNQLIITGVYAHIGCMTTATDAFMRDIKPFMVADALADFSRDEHLMSLKYVAGRSGRVVMTQELLPTPVPTSKEALRSVILPLLDESEEPMDDENLIDYGLDSVRMMALAARWRKVHGDIDFVMLAKNPTIDAWWTLLSREVK

SEQ ID NO: 92488 - protein, 173 aa, unidentified
  source 1..173: note = Clostridioides difficile
  REGION 1..173: note = tr|Q181N3|Q181N3_CLOD6 Putative isochorismatase (2,3 dihydro-2,3 dihydroxybenzoate synthase) OS=Clostridioides difficile (strain 630) OX=272563 GN=CD630_36320 PE=4 S V=1
MVLLIVDAQKLITNERLYKFNEFVVNVENLIDTARKNNIEVIYVRHDDGVENELTKGKNGFEIYEKFKPCNGEKIFDKKVNSAFKETGLLEYLTNNGEKDIIIAGLQTDYCIDATIKCGFEHGFNIIVPAYSNTTVDNFFMSAEQSYKYYNEFIWNERYAKCISLEETLRKMK

SEQ ID NO: 92489 - protein, 231 aa, Clostridium beijerinckii
  REGION 1..231: note = tr|A0A1S8PP90|A0A1S8PP90_CLOBE Isochorismatase; OS = Clostridium beijerinckii OX=1520 GN=entB PE=4 SV=1
MGIKKIKEYNLPVTEELPQNKVPWELNKNDAILLIHDMQQYFLDAYDSKNSLYKTLVQNIKYLKEFCIRNNIPVIYSAQPKGQTDEQRGLLLDFWGKGIPQEGASKEIVEQLQPDKNDFIITKWRYSAFENTDLYEIIKQLNKSQLIICGVYAHIGCLSTTITAFSRGIKPFFVADAMGDFSREKHLMALEYVSQLAGKVVTIRDIVGKDEEKRSKRDAMSEHCHMEGLLV

SEQ ID NO: 92490 - protein, 198 aa, Clostridium ljungdahlii
  REGION 1..198: note = tr|D8GP39|D8GP39_CLOLD Isochorismatase; OS = Clostridium ljungdahlii (strain ATCC 55383 / DSM 13528 / PETC) OX=748727 GN=phzA PE=4 SV=1
MENLKLNENEFINVGKSALVLIDLQNGITAREVSPSPYTSEEVIQNASKLVNAFSEKGAFIVLVRVSTIDGKDMVRPKTDLKVTGMKYPEGWDNLVPEIADTKDAHIVTKRQWGAFYGTDLDLQLRRRGIDTIILGGISTNIGVDTTAREAYQHGYNQIFAEDAMTAVTKEEHEYVCRYIFPRIGKIRTTKEIVSLLK

SEQ ID NO: 92491 - protein, 237 aa, Clostridium putrefaciens
  REGION 1..237: note = tr|A0A381J4G1|A0A381J4G1_9CLOT Isochorismatase EntB; OS = Clostridium putrefaciens OX=99675 GN=entB PE=4 SV=1
MEEKYKDNGGKYEFDQELLDRAFTEARKIYKQRGFQTRMGYGKVPAITTVDMAKAWMSEGHPFTCENCGEVCENALKVLEAARKSGVPIFHTTTGYTGEKQWDLPRWDEKIPMHTLDIDSEWMQIDPKLKPRPEEPVIHKKYASNFFGTHLAQTLNYLGVDTLIVMGATACACVRHTVMDSTGYGFKTIIPEGTIGDRVPGVIAWNLFDMDAKFADVEPLENVVKYLEGIDSKVYNR

SEQ ID NO: 92492 - protein, 198 aa, Clostridium saccharoperbutylacetonicum
  REGION 1..198: note = tr|M1M9U1|M1M9U1_9CLOT Isochorismatase PhzA; OS = Clostridium saccharoperbutylacetonicum N1-4(HMT); OX = 931276 GN=phzA PE=4 SV=1
MENLELNENKFINAEKSALVLIDLQSGITAREIQPSPYTSEEVIHNASKLVNAFSEKGTFIVLVRVSTIDDKDMVKPKTDSKVVGMKYPEGWDNLVPEIANTKNAHIITKRQWGAFYGTDLDLQLRRRGIDTIILGGISTNIGVDTTAREAYQHGYNQIFVEDAMTAVTKEEHDYVCKYIFPRIGKIRTTKEIISSLR

SEQ ID NO: 92493 - protein, 177 aa, Clostridium sp.
  REGION 1..177: note = tr|A0A0F4W7L5|A0A0F4W7L5_9CLOT Isochorismatase; OS = Clostridium sp. IBUN125C OX=1523154; GN = ClosIBUN125C_CONTIG19g01301 PE=4 SV=1
MREVLILIDIQNMYFCEGDYKLYEPERAGKKAAEILEKFRMENKPIIHVKHNFKVDAMENGEYLLDFNECVKPKKKEIIVSKNYPSAFLKTDLKKQLDKLKVDKLVIVGMMTHMCIDTTVRAAQNYGYKVTVIHDACTTKDLKWNGQTIDAQTVHDSIMASLQGTFGEVISCEVFME

SEQ ID NO: 92494 - protein, 232 aa, Clostridium symbiosum
  REGION 1..232: note = tr|A0A174HGL0|A0A174HGL0_CLOSY Isochorismatase hydrolase OS=Clostridium symbiosum OX=1512 GN=dhbB PE=4; SV = 1
MNVNDRYCSFYYENDDDYGTIEIEPEKTALLIIDAEYACVKRPQPENPSPAELENIARWEPFYEKYDKVIIPNLQRLISLCRRTGIEVTYAKIQGFKSNGRDRSLDQKVSGFNQFLVTSGDHRGDIIQEIAPQKEDIVVTKTTDSALTGTNLRLILHNMGIDTVIVTGTMTDQCVSGTVRDLADESFKVWLIEDACLAATKRLHETELEILNNIYCHVITTQELIDAVNQTR

SEQ ID NO: 92495 - protein, 177 aa, Collimonas arenae
  REGION 1..177: note = tr|A0A0A1FF77|A0A0A1FF77_9BURK Isochorismatase; OS = Collimonas arenae OX=279058 GN=LT85_2344 PE=4 SV=1
MKSALLVIDVQHGLFEETPRPFEADTVIERINTLATKARTVGAPVVFIQHETPDDELAYNSPNWQLQPGLQVKNSDIKLRKKTSDSFLRTGLQELLAAQNVDQLVICGYASEFCVDTTVRSAAALGYPVTLAADAHTTHDKPHATGQQIRIHENATLQNVDSFDGKIKAVATVELHF

SEQ ID NO: 92496 - protein, 179 aa, Collimonas fungivorans
  REGION 1..179: note = tr|G0AGA8|G0AGA8_COLFT Isochorismatase OS=Collimonas fungivorans (strain Ter331) OX=1005048 GN=CFU_0161 PE=4; SV = 1
MSYLCDASRATLIIVDLQEKLMPVIDDGALVLQRAVLLAQAAGLLGIPVIGTAQQPLRLGRTVAPIDALLDRTIEKTSFDACAQAPFMAALCNGRDELVVLGCEAHVCVLQTVLGLLHRQRRVKLVSDAIGSRRGSDKQAAIGRACAAGAEIVSSEMLMFEWMGNSDHPEFRKILKLIK

SEQ ID NO: 92497 - protein, 48 aa, Comamonas testosteroni
  REGION 1..48: note = tr|A0A1Y1IUR1|A0A1Y1IUR1_COMTE Rubredoxin; OS = Comamonas testosteroni OX=285 GN=CTR2_0594 PE=4 SV=1
MTCGWLYDEAQGCPEHGIAPNTRWEDVPMNWTCPECGARKEDFEMVEI

SEQ ID NO: 92498 - protein, 199 aa, unidentified
  source 1..199: note = Conexivisphaera calidus
  REGION 1..199: note = tr|A0A4P2VDV8|A0A4P2VDV8_9ARCH Isochorismatase; OS = Conexivisphaera calidus OX=1874277 GN=NAS2_0633 PE=4; SV = 1
MSSAGGRNRIYRTLEEMVSPEHTALIAWDVQRALVGMAFNRDEFLANMNRLIEAARGAGVPVIYTMIDPLPPRFASPVQAALGRSWGNVDRSMFELALQPRGDEVVVRKNTASAFVGTNVELMLRNAGIDTVVIGGISTEYGVESTARDGVNRGFYMVVAGDASSSSDRAAHERSLENMRRLGLIVVARTDEIVRAWRR

SEQ ID NO: 92499 - protein, 218 aa, unidentified
  source 1..218: note = Corynebacterium epidermidicanis
  REGION 1..218: note = tr|A0A0G3GZI0|A0A0G3GZI0_9CORY Nicotinamidase-like amidase OS=Corynebacterium epidermidicanis OX=1050174; GN = CEPID_11920 PE=4 SV=1
MLKLAPEPIRDQQDDHLLTPENCAIVFIDFQEGQYATVGSATSKEINLGAVTLAKLATAYEIPTVVTTVAVDMGVNEATVPEIMRELPGVEQIDRTGVNSWEDADFRAAIEATGKKKIVMAGLWTEVCLAFPTLDMLREGYEIYPVIDAVGGVSSVTHETAIQRMLQAGAQPITSLALGCELMRNWAREDADKYRVIINDYFRRKRAIGAASGDLFHN

SEQ ID NO: 92500 - protein, 224 aa, unidentified
  source 1..224: note = Corynebacterium geronticis
  REGION 1..224: note = tr|A0A3G6J330|A0A3G6J330_9CORY Vibriobactin-specific isochorismatase OS=Corynebacterium geronticis OX=2079234; GN = vibB PE=4 SV=1
MPIPPINGYPLCPSNPLALLENRNTAEHWRIDPTRAALLVHDMQQYFIDAYCREQEPIATVIPAIQKLIAAADAAEVPVFYSVQPPEQKSPRRGLLREFWGEGMQTEQEAAIIPELSPVAHHHIVTKWRYSAFARTDLRHALAFEGRDQLIITGVYGHMGCQVSAVDAFMNDIQPFLVGDAIADFSEEDHARTLNWVASRCGKVIASQEALDHLGAKARAGAAS

SEQ ID NO: 92501 - protein, 185 aa, unidentified
  source 1..185: note = Corynebacterium glyciniphilum
  REGION 1..185: note = tr|X5DPQ2|X5DPQ2_9CORY Isochorismatase hydrolase; OS = Corynebacterium glyciniphilum AJ 3170 OX=1404245; GN = CGLY_00970 PE=4 SV=1
MSSFQDRPNTALLVIDLQNLVVDGAFRRDEVVGTVKDLVDRAHEENVPVVWVQHEAEHLLPNTHEWEFVPELQQEDGDRLVPKTYGDAFEGTILNEVLEDLGVGHIVVTGAETDACIRSTIHGGFTRGYDVTLVADAHTAGDKTEWGAPPVEQVIDHTNLYWQFQGGVGKTAAVETADQVSFVTG

SEQ ID NO: 92502 - protein, 74 aa, Corynebacterium jeikeium
  REGION 1..74: note = tr|Q4JT59|Q4JT59_CORJK Putative isochorismatase; OS = Corynebacterium jeikeium (strain K411) OX=306537; GN = dhbB PE=4 SV=1
MEPITEDQLRGCVAETMKMEPAEIEVSEELYDQGMNSLQLVTVLTWLQEKGYDVSFADLAEDTRLTAWIELLDI

SEQ ID NO: 92503 - protein, 209 aa, Corynebacterium kroppenstedtii
  REGION 1..209: note = tr|C4LL29|C4LL29_CORK4 Isochorismatase; OS = Corynebacterium kroppenstedtii (strain DSM 44385 / JCM 11950 / CIP 105744 / CCUG 35717) OX=645127 GN=entB PE=4; SV = 1
MAIPPIAPYTIPALTTTPTVSWALHADRAALLVHDMQNYFISAYTPDDEPASTMVANIRELIALADEVGVPVFYTAQPPEQKEYRRGLLRELWGQGIQTDAEADIIPELTPRKHHHVITKWRYSAFARTDLRESLAFAKRDQLIITGVYGHMGCGVSAVDAFMNDIQPFLVRDAIADFTRDDHAATINWVARRCGRVVDAEEVLGVLGS

SEQ ID NO: 92504 - protein, 309 aa, unidentified
  source 1..309: note = Corynebacterium lowii
  REGION 1..309: note = tr|A0A0Q0YEJ6|A0A0Q0YEJ6_9CORY Isochorismatase; OS = Corynebacterium lowii OX=1544413 GN=dhbB PE=4 SV=1
MSRDLPTSIAYEMPLEDTAHPAVEWSLDPQRSALLIHDMQRHFLRPFVAGEQPVTALVENTRRLVEAARAAGIPVFYTAQPADQPTDKRGLLTDLWGPGMTGDSQGAEIIAELAPQEGEVVLTKWRYSAFARSDFEEQLRATGRDQLVISGVYARIGCSVTAVDAFMRDVQPFLVADAVADFCREDHHQAVQWVAACVGEVTDTAAVLSAWGGAGAAPDSVPEAEAGAADLRAVGLRAVDLRALLAELLEEDLTDLDEEGDRLDDWGLDSVRLMTMITRLREQGIDVSFEDVPEDATFAELREIVEEGA

SEQ ID NO: 92505 - protein, 207 aa, Corynebacterium matruchotii
  REGION 1..207: note = tr|A0A3S4XW57|A0A3S4XW57_9CORY Isochorismatase; OS = Corynebacterium matruchotii OX=43768 GN=entB PE=4 SV=1
MAIPQLSPYEIPPLPTNQAAHWQLDPKRAALLVHDMQEYFIAAYDRNANPMSMVLSNIQSIISFADSHGMPVFFSAQPPAQHWSRRGLLNDVWGTGIVTDAQAAIIPELEPAAAHHQVITKWRYSAFERTDLEQALAFTRRNQLIITGVYGHMGCQVTAVDAFMKDIQPFMVGDAIADFSATEHAEAMSWVAKRSGMVISTAEVLSA

SEQ ID NO: 92506 - protein, 207 aa, Corynebacterium mustelae
  REGION 1..207: note = tr|A0A0G3H388|A0A0G3H388_9CORY Isochorismate hydrolase OS=Corynebacterium mustelae OX=571915; GN = CMUST_14535 PE=4 SV=1
MTDIPKISYSIADIPIVDSQRRWELKPSQAALLVHDYQNYFLNFLSPLLQQELLDATNRIIKAARNYEMPIIFSGQAGYGDRAERGIIRDLWGKGMASSGTEIELDPRLSRSSTDYTVTKQRYSAFASTNLASILSATRRNQLVLCGIYGSVGIIATAYDCVNRDLESFLIPDAIADFTSVDHELTVNLLSAYSSDLLYSSEFGDDG

SEQ ID NO: 92507 - protein, 78 aa, unidentified
  source 1..78: note = Corynebacterium oculi
  REGION 1..78: note = tr|A0A0Q0YQ01|A0A0Q0YQ01_9CORY Isochorismatase; OS = Corynebacterium oculi OX=1544416 GN=dhbB_2 PE=4 SV=1
MATVDEVIHNITAKVADMLGVTPESIDPEEELFDQGLDSVRLMDLVTEIRNQGFDVDFADLAEDSRLSAWRAELEEAA

SEQ ID NO: 92508 - protein, 79 aa, unidentified
  source 1..79: note = Corynebacterium pelargi
  REGION 1..79: note = tr|A0A410WB12|A0A410WB12_9CORY Vibriobactin-specific isochorismatase OS=Corynebacterium pelargi OX=1471400; GN = vibB PE=4 SV=1
MNDTSPQALQQDRIVADIAAMLQIEAAELDLDALLSEQGLDSLRMITLIESWRAAGADIDFHRMMALPTAREWIAELNA

SEQ ID NO: 92509 - protein, 227 aa, unidentified
  source 1..227: note = Corynebacterium provencense
  REGION 1..227: note = tr|A0A2Z3YN39|A0A2Z3YN39_9CORY Isochorismatase; OS = Corynebacterium provencense OX=1737425 GN=dhbB_1 PE=4; SV = 1
MATDLPGLISYPLPTDLPDPVVDWTPDPGRCALLVHDMQRHFLRPFDPSTQPLTSLVPNTVTLAEQARRCGVPVFYTAQPADQPPEKRGLLNDYWGPGLTGSPEGARIIDELTPEDGDRVLTKWRYSAYAYTDFADQLAELGRDQLVITGVYASIGCSVTAVESFMAGVQPFLVADALGDFSRREHELALQWTGHRAGVVTDTAAVTAHWAGPGKDAGISPRPADPS

SEQ ID NO: 92510 - protein, 223 aa, unidentified
  source 1..223: note = Corynebacterium pseudopelargi
  REGION 1..223: note = tr|A0A3G6IWI2|A0A3G6IWI2_9CORY Isochorismatase; OS = Corynebacterium pseudopelargi OX=2080757 GN=dhbB PE=4; SV = 1
MPIPAIAPYPLSSSEPLALLSTPNTAEHWNIDLNRCALLVHDMQNYFIEAYDRNQAPMATVLPNIQALISAADDAEVPVFYSVQPPEQKTARRGLLSDFWGKGMQTTQDAQVVEELTPLPHHHLLTKWRYSAFERTDLRQALAFEGRDQLIITGVYGHMGCQVSAVDAFMNDIQPFLVADGIADFSAEDHQRTLNWVAARCGKVVAANEALNALQARTHEVRL

SEQ ID NO: 92511 - protein, 175 aa, Corynebacterium variabile
  REGION 1..175: note = tr|G0HGL1|G0HGL1_CORVD Enterobactin isochorismatase; OS = Corynebacterium variabile (strain DSM 44702 / JCM 12073 / NCIMB 30131) OX=858619 GN=entB PE=4 SV=1
MQRHFLKPFDPASEPLASLVPNTARLIARSRAAGIPVFYTAQPSDQPVEKRALLNDWWGPGLTGNPEGAQIIDEVAPVDGDRVLTKWRYSAYAYSDFDEQLAALGRDQLVITGVYASIGCSVTAVESFMGGVQPFLVADALGDFSGTEHRLALQWTGRRAGVVLDTDAVLQHWAD

SEQ ID NO: 92512 - protein, 177 aa, Cronobacter condimenti
  REGION 1..177: note = tr|K8A366|K8A366_9ENTR Isochorismatase; OS = Cronobacter condimenti 1330 OX=1073999 GN=BN137_3756; PE = 4 SV=1
MSVPRVVMVIDMQNGVFATPRFDREGRVARINQLMAQARQVIIVQHAEAGGLEEGSTGFAVLPDLNVPENALRVTKTACDAFYRTPLEALLREHGITEFVVCGCASDYCVDTTIKQAASRGFRLTIASDAHTTADRTAAAAPILITHYNEVWANLTVPDNAPGVLPTADILSAWQAN

SEQ ID NO: 92513 - protein, 177 aa, Cronobacter dublinensis
  REGION 1..177: note = tr|K8ALX9|K8ALX9_9ENTR Isochorismatase; OS = Cronobacter dublinensis 1210 OX=1208656 GN=BN134_2009; PE = 4 SV=1
MSVPQVVMVIDMQNGVFATPRFDREGRTARINALMAGAEQVIIIQHAEAGGLEEDSPGFALLPALNVPEHALRVTKTACDAFWNTPLEALLRERNIEAFVVCGCASDYCVDTTIKQAASRGFRVTIAGDAHTTANRTAATAPVLIEHYNEVWANLTVPGNPLRVLSTASILTAWQAN

SEQ ID NO: 92514 - protein, 166 aa, Cronobacter sakazakii
  REGION 1..166: note = tr|K8CZ37|K8CZ37_CROSK Isochorismatase; OS = Cronobacter sakazakii 696 OX=1208664 GN=BN128_4061 PE=4; SV = 1
MQNGVFATPRFDRDGRVARINQLMAGAEQVIIIQHTEPGGLEEDSPGFAFLPELNVPQNALRVTKTACDAFYRTPLEALLREHNINAFVVCGCASDYCVDTTIKQAASRGFQVTVAGDAHTTADRRAAAAPVLIDHYNDVWSTLTIPGNPLRVMKTDAILDAWQAN

SEQ ID NO: 92515 - protein, 289 aa, Cronobacter turicensis
  REGION 1..289: note = tr|C9XXI3|C9XXI3_CROTZ Isochorismatase; OS = Cronobacter turicensis (strain DSM 18703 / LMG 23827 / z3032) OX=693216 GN=entB PE=4 SV=1
MAIPKLNAYTLPTAADLPQNKVSWALEPPRAALLIHDMQEYFLNFWGENCPMIEQVVANIAALRKYCKAQGIPVYYTAQPNNQSDADRALLNDMWGPGLNNHPDKQKVVAALAPDADDTVLVKWRYSAFHRSPLEHTLKETGRDQLIICGVYAHIGCMITATDAFMRDIKPFMVADALADFSRDEHLMALNYVAGRAGRVVMTADLLPANDSDAPGSKAALRALVLPLLDESDEPEDDENLIDYGLDSVRMMALAARWRKVHGDIDFVMLAKNPTIDAWWALLSREPQA

SEQ ID NO: 92516 - protein, 289 aa, Cronobacter universalis
  REGION 1..289: note = tr|A0A376EPY7|A0A376EPY7_9ENTR Isochorismatase; OS = Cronobacter universalis NCTC 9529 OX=1074000 GN=entB; PE = 4 SV=1
MAIPKLNAYTLPTAADLPQNKVSWALEPSRAALLIHDMQEYFLNFWGENSPMIEQVVANIAALRAYCKAQGIPVYYTAQPNNQSDADRALLNDMWGPGLNNHPDKQKVVAALAPDADDTVLVKWRYSAFHRSPLEHALKETGRDQLIICGVYAHIGCMITATDAFMRDIQPFMVADALADFSRDEHLMALNYVAGRAGRVVMTADLLPASEPDAPGSKAALRALVLPLLDESDEPEDDENLIDYGLDSVRMMALAARWRKAHGDIDFVMLAKNPTIDAWWALLSREPQA

SEQ ID NO: 92517 - protein, 176 aa, Cupriavidus basilensis
  REGION 1..176: note = tr|A0A0C4YNE2|A0A0C4YNE2_9BURK Isochorismatase; OS = Cupriavidus basilensis OX=68895 GN=RR42_s0478 PE=4 SV=1
MLHNAAESVLVLVDFQGRLMPAIHEGDRVAKEAVRLGNIARVLDVPVIGTEQSPGSLGGNIDDIKRLCDRTLAKDYFDGCRDGLLDLLPEGRKNVVVAGCEAHVCVLQTVAGLLGHGLKVTVVLDAIGSRQARSREAAIDRMRNSGATAATVEMVAFEWMRTSQHERFREVLGFVK

SEQ ID NO: 92518 - protein, 202 aa, Cupriavidus necator
  REGION 1..202: note = tr|F8GSN8|F8GSN8_CUPNN Isochorismatase hydrolase; OS = Cupriavidus necator (strain ATCC 43291 / DSM 13513 / N-1) OX=1042878 GN=CNE_2c08360 PE=4 SV=1
MNHPTIRTMAGAPAPTAIEAASSALLVIDFQNEYFSGKMPIPDGARALGNAQRLIAHADAAGIPVVHIQHVTPAGSPIFAEQSASVKFHSDLQPAAHHTVLQKTSVSVFPTTDLDQRLKAAGIKTLIITGLMTHACVSGAARDAVPLGYGVIVAEDACATRDLDTAGGVVPHRDLHRAALATIDDTFGDILTTEQVLKLPIA

SEQ ID NO: 92519 - protein, 202 aa, Cupriavidus sp.
  REGION 1..202: note = tr|A0A388RPL5|A0A388RPL5_9BURK Isochorismatase; OS = Cupriavidus sp. P-10 OX=2027911 GN=CTP10_4284 PE=4 SV=1
MTHPTIRTLAGASAPTAIAAASTALLVIDFQNEYFDGKLPIPDGAAALGNARRLVAHADAAGIPVFHVQHLAPAGSPVFAEQGASAAFHQDLQPAGHHTVVQKTSVSVFPTTDLDQRLKAAGIKTPVITGLMTHACVAGAARDAVPLGYGVIVAEDACATRDLDRAGGVVRHRDLHQAALASIEDTFGDVLTTEQVLRLPVA

SEQ ID NO: 92520 - protein, 202 aa, Cupriavidus taiwanensis
  REGION 1..202: note = tr|B3R8I8|B3R8I8_CUPTR Putative Isochorismatase hydrolase OS=Cupriavidus taiwanensis (strain DSM 17343 / BCRC 17206 / CIP 107171 / LMG 19424 / R1) OX=977880; GN = RALTA _B0726 PE=4 SV=1
MHHPTLRKIAGAPARAAIDAASTAVLVIDFQNEYFSGKLPIPDGAAALGNARRLVGHADAAGMPVFHIQHVTPAGSPVFAEHGATVAFHGDLQPAPHHTVLQKTSVSAFPTTDLDQRLKAAGIQTLIITGLMTHACVTGAARDAVPLGYGVIVAADACATRDLDTVAGTIAHQDLHRAALAALDDTFGDILTTEQVLKLPLA

SEQ ID NO: 92521 - protein, 182 aa, Deferribacter desulfuricans
  REGION 1..182: note = tr|D3PC35|D3PC35_DEFDS Isochorismatase hydrolase; OS = Deferribacter desulfuricans (strain DSM 14783 / JCM 11476 / NBRC 101012 / SSM1) OX=639282 GN=DEFDS_0678 PE=4; SV = 1
MYSLKRDDAVLVVVDIQKKLVKIMPEKVYEKILKNNQILIKAAKILNIPVIYTQQYTKGLGETVDELKELLTDEHVEKLTFSCCKEQSFLEKLKSLGRKSVILTGMEAHICVLQTAIDLLENGYNVFTVADAVCSRFKDNWKFGLEYMRDAGAKITVVETVLFQLLERSDAKEFKEVQALIK

SEQ ID NO: 92522 - protein, 192 aa, unidentified
  source 1..192: note = Defluviimonas aquaemixtae
  REGION 1..192: note = tr|A0A2R8BJX5|A0A2R8BJX5_9RHOB Putative isochorismatase OS=Defluviimonas aquaemixtae OX=1542388; GN = phzD PE=4 SV=1
MSDLLFDRRQSVLAVIDVQARFLDKLPPQQREPLVGRIAWLIGVARHLSVPVVAMAEDVEQNGPPVGEVTDALPPETRVFDKRVFGLAGQGDILDAVRASGRTEAVLLGLETDVCVSQSALGLLAAGYRVVAVSDATASPGEHHAAGLARMKQAGVTITTVKGIFYEWARDLETLGHTRSAMGAILPAGLTL

SEQ ID NO: 92523 - protein, 175 aa, Dehalobacter sp.
  REGION 1..175: note = tr|K4LIJ7|K4LIJ7_9FIRM Isochorismatase; OS = Dehalobacter sp. CF OX=1131462 GN=DCF50_p2455 PE=4 SV=1
MQKKALVIIDIQNDITKNYKDIIDNINKAIDWAVHNNIHVIYIRHENLSAGTRTFKTNTYGSELASDLKIVSKNVFTKYKGNALSSEEFADFISKNEICDFYITGADAIACVKSTCYNLCKANYGVNVLSDCITSYDKRKIDEMLRYYESKGSKIIRLNDLLPKRDPGYSQCFVD

SEQ ID NO: 92524 - protein, 179 aa, Dehalogenimonas sp.
  REGION 1..179: note = tr|A0A0F7CTR6|A0A0F7CTR6_9CHLR Isochorismatase; OS = Dehalogenimonas sp. WBC-2 OX=943347 GN=DGWBC_0714 PE=4; SV = 1
MLRIDDTLLVVIDVQEKLFRVIPDKDILLAHLQKLIRGCAILEIPVIVTEQNPAGLGATVAELAGLLSDSSRITKFTFSCCAESSFMDQLAATGRKQILICGIESHICVFQTTSDLLSQGYETHVITDCVASRTHDNKELALNRLNAEGAKLTGVEMALFELLRTAKAEQFKSISSLIK

SEQ ID NO: 92525 - protein, 290 aa, Deinococcus maricopensis
  REGION 1..290: note = tr|E8U3H6|E8U3H6_DEIML Isochorismatase; OS = Deinococcus maricopensis (strain DSM 21211 / LMG 22137 / NRRL B-23946 / LB-34) OX=709986 GN=Deima_0183 PE=4 SV=1
MIPRIATYPMPTESDLPRSRVPWTPDAARTVLLVHDLQQYFLDFYDAAHAPIPELFAHVNALLERCRALGIPVVYTAQPGDQAPADRALLTDFWGPGLRDDPAQVRVHPAVAPQGGDTVLTKWRYSAFVRTPLREQLRAWGRDQLLICGVYANIGCLLTAADAFMHDTQAFLIGDAVADFTRAQHDQALTYAAGRCASVLSTRQVLDALPAPAAALSPARVRADLAAHVGLSADDLRDDDDLLLLGLDSIRLMLLVEAWTGAGATITYADVVADPTVGGVLRRLSAGVGA

SEQ ID NO: 92526 - protein, 179 aa, unidentified
  source 1..179: note = Deltaproteobacteria bacterium
  REGION 1..179: note = tr|A0A1V6ISI5|A0A1V6ISI5_9DELT Vibriobactin-specific isochorismatase OS=Deltaproteobacteria bacterium ADurb.Bin022 OX=1852863 GN=vibB PE=4 SV=1
MLNRLEAVLVIVDIQEKLFRVMERQESLIGNTIKLIQGFQALDIPILVTEQIPAKIGPTIPEISEKLAGVSPVAKESFSCWGEPAFRSRLESLNRRQVVLTGIECHVCVYQTALDLMANGYSVHPVTDTVSSRTSANRKIGLSSMKSAGAHLTSTEMVLFELLRTAACPQARNIFKIVK

SEQ ID NO: 92527 - protein, 378 aa, Dermatophilus congolensis
  REGION 1..378: note = tr|A0A239VD89|A0A239VD89_9MICO Isochorismatase; OS = Dermatophilus congolensis OX=1863 GN=dhbB PE=4 SV=1
MPLPKIARYSYDSRTALALNGTNWKVDPERAVLLIHDMQRHYIDAFEPGGQASIATARIIDLLDIAREHEIPVIYTAQDPYANDDEDTTDEAIAPTDEADTADVEQEDVEQAETGDEEPSTAENTDDQDAADQPAPESEAAEEHITDAGSSNEEETSEEELDNIGPVLGASHDETPPATDNGEEETHPEDPEEPHDDDLDGADILDHLAPEENDTVLTKWQYSDFHDSELRERMRQEGRDQLIITGIYAHVNCLATALVASAEKLQPFFVADAMADHSREEHEMAARSVASSCGQVVTTADILHALMPQLDEEENTTTNHEVIGSVLSETKPLSELFADLDAAASLAPDPEPIAAPVIETEDAKVIPFTAAPEPAPQA

SEQ ID NO: 92528 - protein, 95 aa, Desmospora sp.
  REGION 1..95: note = tr|F5SDX5|F5SDX5_9BACL Isochorismatase OS=Desmospora sp. 8437 OX=997346 GN=pncA PE=4 SV=1
MEGVFREGPATFVVTGDCTDLCIYQNATGIRLLANEHDADVRVVVSAEHTRTFDTPVETAKSIGAHAHDGEFMDHVFLYHMKLNGVEVVRTIHVD

SEQ ID NO: 92529 - protein, 196 aa, Desulfovibrio sp.
  REGION 1..196: note = tr|A0A388SLL3|A0A388SLL3_9DELT Isochorismatase; OS = Desulfovibrio sp. HK-II OX=2009266 GN=RVX_2281 PE=4 SV=1
MSSSAATAPASATAAAPVTALVLVDIQRDYFPGGRMALPDAENAGRRAADLLARCRAASMPVIHVRHESIRPGSTFFLPGTEGADIHPLAAPLPGEAVLTKNFPNSFRDTTLLQHLRDLGATDIIVVGMMTHMCIDTTVRAAFDLGFRCRVAGDATASPPLSYGGRTVDADTVRATFLAALHGVFAEVTDAADLAV

SEQ ID NO: 92530 - protein, 184 aa, unidentified
  source 1..184: note = Desulfurella amilsii
  REGION 1..184: note = tr|A0A1X4XUI4|A0A1X4XUI4_9DELT Isochorismatase; OS = Desulfurella amilsii OX=1562698 GN=DESAMIL20_743 PE=4; SV = 1
MSFLSRENCVLCVIDMQDKLAKVMKKLDNTTKNISLLIKASKELDVPIFYTEQYPKGLGETIEPLKSLLADTQRFDKMSFSALEIPEIKTFIVDSSKTTVVLCGIESHICVLSTTIDLIEKGYNVIIAKDAVTSREEEFYNTAVDFYNSIGAKVIPSESIVFYWLKFAGTESFKKLQKVILSKE

SEQ ID NO: 92531 - protein, 290 aa, unidentified
  source 1..290: note = Dickeya aquatica
  REGION 1..290: note = tr|A0A375A8F5|A0A375A8F5_9GAMM Isochorismatase [enterobactin] siderophore / Apo-aryl carrier domain of EntB OS=Dickeya aquatica OX=1401087 GN=cbsB PE=4 SV=1
MAIPMLNSYPLPTKAELPVNKVKWQVESHRAALLIHDMQNYFLNFWETSSPLTAQLIANIVRIRQLCHQLGIPVFYTAQPNAQSDKDRALLNDMWGPGLNRHPDQQQITAALTPDECDTVLVKWRYSAFHRSDLEQRLHTAGRDQLIICGVYAHIGCLTTATDAFMRDIQPFMVADALADFSREEHMMALRYTAGRCGRVLDSEQLLSELTAQPDNSLTRLRAELLPLLDGDADPADDENLLDYGLDSVSIMSLVTRWRQQGHDVDFVTLVKKPTLRHWHQLLMQVREEA

SEQ ID NO: 92532 - protein, 291 aa, Dickeya chrysanthemi
  REGION 1..291: note = tr|C6CQI6|C6CQI6_DICC1 Isochorismatase OS=Dickeya chrysanthemi (strain Ech1591) OX=561229 GN=Dd1591_1316; PE = 4 SV=1
MAIPKLNAYPLPGEEHLPVNKVNWPVDATRAALLIHDMQNYFLNFWGENSPLTEQLIANVARIRQACRRQGIPVFYTAQPNQQSDADRALLNDMWGPGLNRHPEQQQITPALTPDANDTVLVKWRYSAFHRSDLEQRLNAAGRDQLIICGVYAHIGCLTTATDAFMRDIKPFMVADALADFSQEEHLMALRYTAGRCGRVLTSAQLLDALAPQTDDGLARLRAELLPLLDDDDEIGDDDNLLDYGLDSVRIMSLVTRWRQQGHDLDFVALVKNPTLRHWHQLLSQRQPEEA

SEQ ID NO: 92533 - protein, 174 aa, Dickeya dadantii
  REGION 1..174: note = tr|E0SN14|E0SN14_DICD3 Isochorismatase OS=Dickeya dadantii (strain 3937) OX=198628 GN=Dda3937_01697 PE=4 SV=1
MRVLIVVDMQNGVFATPRYQQDMVVERINRLIDSADQTIFIQHADADMLPGSEAWQLLPSLYRPANAISVTKTACDAFYRTELADVLNRLDVRHFTVCGCATDYCVDATIKNAASRGYAQTVAGDAHTTAERRAVSAAQLIAQHNDVWRDFIIPGNTLRVEDTEVILREWLAQV

SEQ ID NO: 92534 - protein, 291 aa, Dickeya paradisiaca
  REGION 1..291: note = tr|C6C323|C6C323_DICP7 Isochorismatase OS=Dickeya paradisiaca (strain Ech703) OX=579405 GN=Dd703_1488 PE=4; SV = 1
MSIPSLNDYSLPTDDQLPANKVNWPLDADRAALLIHDMQCYFLNFWGQDSQLTQQLIANIVRLKQICRQRGIPVFYTAQPDRQSPADRALLNDMWGPGLNRHPDQQKITDALAPDPEDTVLVKWRYSAFQRSDLEQRLKQSGRDQLIICGVYAHIGCLTTATDAFMRDVKPFMVADALADFSQEEHMMALRYTAGRCGRVVTTDQSLSALAPATGYTLTQLRADLLPLLDDDSDDICDDENLLDYGLDSVRIMSLVARWRQQGHDLDFVALVKQPTLRHWHRLLNPLREGA

SEQ ID NO: 92535 - protein, 180 aa, unidentified
  source 1..180: note = Dickeya solani
  REGION 1..180: note = tr|A0A2K8VU08|A0A2K8VU08_9GAMM Isochorismatase; OS = Dickeya solani RNS 08.23.3.1.A OX=1240086 GN=D083_0389; PE = 4 SV=1
MPRALLIIDMQRFVTDSIQQGMGYYPATCIENMTRVLEQFRTTGATVIHVRHESAAGTPMQPGAPLAMPMEAFDALPEEPVFIKNTSSAFSSTALLPYLQSKQIAEVVVIGAVAGFCVNSTVRMGSDLGLNMVVVNDAVISFELQPANLTAKEIFDVTLALLGTSFARSISTEAFLKESQ

SEQ ID NO: 92536 - protein, 200 aa, Dinoroseobacter shibae
  REGION 1..200: note = tr|A8LQF0|A8LQF0_DINSH Isochorismatase; OS = Dinoroseobacter shibae (strain DSM 16493 / NCIMB 14021 / DFL 12) OX=398580 GN=entB PE=4 SV=1
MSAPLDPKRTALLTIDLQNDFLHPEGAYGRAGQTAPHLVALPDRIAPLRDRLREKGGTFISAQFTLVPDRDGNPLIAEHLQRLRPFLGRGDFRPGGWGHGLVDTLAPADFTIEKVAYSAFYQTRLEYILRALEIDTLIIGGIVTNGGVASTVRDAHLRNIHTVLLGDGSGAFDPAVHDATLTSLGTVTEIRSCAEAEAML

SEQ ID NO: 92537 - protein, 205 aa, Duganella sp.
  REGION 1..205: note = tr|A0A1E7WZ48|A0A1E7WZ48_9BURK Vibriobactin-specific isochorismatase OS=Duganella sp. HH101 OX=1781066 GN=vibB; PE = 4 SV=1
MTATPRRALIVIDVQNEYFTGKMKIEYPPVETSLPNIGRAMDAAREAGIPVVVVQHDAPEASPIFALGSDGWKVHPVVAQRVHDHFINKGMASVFAGTDLADWLKERGVDTLTIAGYMTHNCNASTIFEAKHRGLQVEVLEDATGALPYENAAGKVSAEEIHRVFNTVFHSNFGAVVSTEDWQVAVRDGRKLESDNIYLSNQRTR

SEQ ID NO: 92538 - protein, 217 aa, Dyella sp.
  REGION 1..217: note = tr|A0A2N7QNA0|A0A2N7QNA0_9GAMM Putative isochorismatase OS=Dyella sp. AD56 OX=1528744 GN=phzD PE=4; SV = 1
MSITATPTPGKQLITPTDHTLILIDFQSQMSFATHSIDPTVLRNNAALVANAAASFKVSTILTTVAEKTFSGPMYSEITDPFPGQALLDRTSMNTWEDAAVIKRVNAIGKSRLVLAGLWTSVCIVGPALSALDQGFEVYVIADACGDVSAEAHNRAIERMIQAGARPMTSLQYLLELQRDWARTESYDSTTDIARRFGGSYGLGITYAKSMFGAHEG

SEQ ID NO: 92539 - protein, 222 aa, unidentified
  source 1..222: note = Edwardsiella anguillarum
  REGION 1..222: note = tr|A0A076LSW9|A0A076LSW9_9GAMM Isochorismatase; OS = Edwardsiella anguillarum ET080813 OX=667120; GN = ETEE_3355 PE=4 SV=1
MTQQAFQAQPFALPFDPQSTALVMIDMQRDFVEAGGFGEALGNDVSLVRSAIAPCQKVLAAARAHQLLVIHTREGHRADLSDCPAAKLTRGGKTFIGEPGPMGRILVRGEPGHDIIPELYPIAGEPVVDKPGKGAFYQTDLQLILQNHGIKTLIVCGVTTEVCVNTTVREANDRGYQCIIPADCVGSYFPEFQKSALEMIKAQGAIFGWVSDADSIIAGLQG

SEQ ID NO: 92540 - protein, 183 aa, unidentified
  source 1..183: note = Empedobacter falsenii
  REGION 1..183: note = tr|A0A376G823|A0A376G823_9FLAO Isochorismatase; OS = Empedobacter falsenii OX=343874 GN=dhbB PE=4 SV=1
MSKKALIIIDIQNDYFEGGAIELVNPVEASLNARKVLNYFRENNLPIAHIQHVSANHEVMPIFVEGTKGFDIHENVKPLDGEKVFRKYFPNSFRGTGLLEYLKENEVTEVVITGMMTHMCVDATTRAAFDFEYKCTVIGDACASRDLEIKGSSVKSTDVHNAFLSALEFFYAEIKNTDEFLSA

SEQ ID NO: 92541 - protein, 263 aa, unidentified
  source 1..263: note = Enterobacter agglomerans
  REGION 1..263: note = tr|A0A379AMF0|A0A379AMF0_ENTAG Isochorismatase; OS = Enterobacter agglomerans OX=549 GN=entB PE=4 SV=1
MKWMLEPDRAALLIHDMQRYFLNFWGENSPLVEQVVDNIARLRRYCKAQGIPVFYTAQPNAQSDEDRALLNDMWGPGLNKHPDQQKIVDALAPDEDDQVLTKWRYSAFHRSPLESILQEMGRDQLIITGVYAHIGCLTTATDAFMRNIQPFMVADALADFSREEHMMALTYTAGRSGKVVMTADLMPVPLSKDDLRALILPLLEDDEVPEDDENLIDYGLDSVRVMALAARWRQVHRDIDFVSLAKNPSIDGWWALLTREPAK

SEQ ID NO: 92542 - protein, 191 aa, Enterobacter asburiae
  REGION 1..191: note = tr|A0A376F519|A0A376F519_ENTAS Isochorismatase; OS = Enterobacter asburiae OX=61645 GN=entB PE=4 SV=1
MWGPGLTRSPEQQRIVAELTPDEADTVLVKWRYSAFHRSPLEQMLKETGRNQLLITGVYAHIGCMTTATDAFMRDIKPFFIADALADFTRDEHLMSLNYVAGRSGRVVMTDELLPFVPATKAALRELILPLLDESDEPMDDENLIDYGLDSVRMMALAARWRKVHGDIDFVMLAKNPTIDAWWALLSREVK

SEQ ID NO: 92543 - protein, 284 aa, Enterobacter cancerogenus
  REGION 1..284: note = tr|D2ZGJ6|D2ZGJ6_9ENTR Isochorismatase; OS = Enterobacter cancerogenus ATCC 35316 OX=500639 GN=entB; PE = 4 SV=1
MAIPKLTAYALPTAADLPNNKVNWAFEPERAALLIHDMQEYFLNFWGENSAMMAQVVANIARLRDYCKEHNIPVYYTAQPKEQSDEDRALLNDMWGPGLTRSPEQQRIVAELTPDEADTVLVKWRYSAFHRSPLEQMLKETGRNQLLITGVYAHIGCMTTATDAFMRDIKPFFIADALADFTRDEHLMSLRYVAGRSGRVVMTDELLPSVPASKAALRELILPLLDESDEPMDDENLIDYGLDSVRMMALAARWRKVHGDIDFVMLAKNPTLDAWWALLSREVK

SEQ ID NO: 92544 - protein, 824 aa, Enterobacter cloacae
  REGION 1..824: note = tr|A0A377M4K1|A0A377M4K1_ENTCL 2,3-dihydroxybenzoate-AMP ligase OS=Enterobacter cloacae; OX = 550 GN=entB PE=4 SV=1
MTIPFTRWPEEFARRYREKGYWQDLPLTHILTDHAEKDTVAIIDGERHLTWRAFNQAVNNLASALQGQGVRRGETALVQLGNVAEFYITFFALLQVGVAPVNALFSHQRNELNAYAAQIKPALLIADREHALFAGDDFLNRFVDEHRSVRVVLLRGDNGAHALEAAIAHPATHFIPNPTPADEVAFFQLSGGSTGTPKLIPRTHNDYDYSIRRSNEICGITADTRYLNALPAAHNYAMSSPGSLGVFMAGGCVVLAHDPSATICFPLIERHQINVTSLVPPAVSLWLQAIADGAGNAQLKSLKLLQVGGARLSATLAARIPAEIGCQLQQVFGMAEGLVNYTALDDTPERIIHTQGRPMCPDDEVWVADEQGNPLPRGETGRLMTRGPYTFRGYFNSPEHNASAFDANGFYCSGDLIAIDEQGYITVQGREKDQINRGGEKIAAEEIENLLLRHEAVIHAALVSMEDSLLGEKSCAFLVVKQPLRAVEVRRFLREQGVAEFKLPDRVESVDALPLTPVGKVDKKQLRLWIAERARPEEQSMAIPKLTAYALPTAAELPTSKVNWAFEPERAALLIHDMQEYFLNFWGENSAMMQQVVANIARLRTYCKAHNIPVYYTAQPKEQSDEDRALLNDMWGPGLTRSPEQQRIVAELTPDEADTVLVKWRYSAFHRSPLELMLKETGRNQLLITGVYAHIGCMTTATDAFMRDIKPFFIADALADFTREEHLMSLNYVAGRSGRVVMTDDLLPSVPASKAALRELILPLLDETDEPMDDENLIDYGLDSVRMMALAARWRKVHGDIDFVMLAKNPTLDAWWALLSREVQ

SEQ ID NO: 92545 - protein, 225 aa, Enterobacter hormaechei
  REGION 1..225: note = tr|F5RT72|F5RT72_9ENTR Isochorismatase family hydrolase OS=Enterobacter hormaechei ATCC 49162 OX=888063; GN = ycaC PE=4 SV=1
MSTPANFNGARPVIDVNDAVMLLIDHQSGLFQTVGDMPMPELRARAAALAKIASLAKIPVITTASVPQGPNGPLIPEIHANAPHAQYVARKGEINAWDNPEFVAAVKATGRKTLIIAGTITSVCMAFPSISAVADGYKVFAVIDASGTYSKMAQEITLARVVQAGVVPMDTAAVASEIQRTWNREDAGEWAEVYTHIFPAYQLLIESYSKAQDVVKNSEVLDSQR

SEQ ID NO: 92546 - protein, 284 aa, Enterobacter kobei
  REGION 1..284: note = tr|A0A5E0UWA3|A0A5E0UWA3_9ENTR Isochorismatase; OS = Enterobacter kobei OX=208224 GN=entB_1 PE=4 SV=1
MAIPKLTAYALPTAAELPTSKVNWAFEPERAALLIHDMQEYFLNFWGENSDMMQQVVANIAKLRAYCKEHNIPVYYTAQPKDQSDEDRALLNDMWGPGLTRSPEQQRIVAELTPDEADTVLVKWRYSAFHRSPLEQMLKETGRNQLLITGVYAHIGCMTTATDAFMRDIKPFFIADALADFTRDEHLMSLKYVAGRSGRVVMTDELLPSVPATKAALRELILPLLDESDEPMDDENLIDYGLDSVRMMALAARWRKVHGDIDFVMLAKNPTLDAWWALLSREVK

SEQ ID NO: 92547 - protein, 283 aa, unidentified
  source 1..283: note = Enterobacter lignolyticus
  REGION 1..283: note = tr|E3G5C1|E3G5C1_ENTLS Isochorismatase; OS = Enterobacter lignolyticus (strain SCF1) OX=701347; GN = Entcl_3200 PE=4 SV=1
MAIPKLQAYALPTAADLPSNKVNWPFEPARAALLIHDMQDYFLNFWGDNSPLMATVVANIAALRQYAKQHHIPVYYTAQPKTQSDEDRALLNDMWGPGLTRSPEQQRIIAALAPDEADTVLVKWRYSAFHRSPLEQALKETGRDQLVITGVYAHIGCMTTATDAFMRDIKPFFVADALADFSREEHLMSLNYVAGRSGRVVMTDELLPLPGSKAALRALILPLLDESDEPMDDENLVDYGLDSVRMMALAARWRKVHGDIDFVMLAKNPTLDAWWALISREVK

SEQ ID NO: 92548 - protein, 284 aa, Enterobacter soli
  REGION 1..284: note = tr|A0A198GQ94|A0A198GQ94_9ENTR Isochorismatase; OS = Enterobacter soli ATCC BAA-2102 OX=1354262; GN = M987_02264 PE=4 SV=1
MAIPKLTAYALPTAADLPNNKVNWAFEPERAALLIHDMQEYFLNFWGENSPMMAQVVANIAKIRAYCKEHNIPVYYTAQPKEQSDEERALLNDMWGPGLTRSPEQQRIVAELAPDEADTVLVKWRYSAFHRSPLELMLKETGRNQLLITGVYAHIGCMTTATDAFMRDIKPFFIADALADFTREEHLMSLNYVAGRSGRVLMTEELLPSIPASKEALRAMILPLLDESDEPMDDENLIDYGLDSVRMMALAARWRKVHGDIDFVMLAKNPTLDAWWALLSREVK

SEQ ID NO: 92549 - protein, 284 aa, Enterobacter sp.
  REGION 1..284: note = tr|A4W7X8|A4W7X8_ENT38 Isochorismatase; OS = Enterobacter sp. (strain 638) OX=399742 GN=Ent638_1127; PE = 4 SV=1
MAIPKLTGYALPTAAELPNNKVSWAFEPDRAALLIHDMQEYFLNFWGENCPMMEQMVANIAQLRDYCKKHNIPVYYTAQPKEQSHEDRALLNDMWGPGLTRSPEQQRIVSELTPDEADTVLVKWRYSAFHRSPLEQMLKETGRNQLLITGVYAHIGCMTTATDAFMRDIKPFFIADALADFSREEHLMSLNYVAGRTGRVVMTDELLPSVPASKAALRAVILPLLDESDEPMDDENLIDYGLDSVRMMALAARWRKVHGDIDFVMLAKNPTLDAWWALLSREVK

SEQ ID NO: 92550 - protein, 167 aa, Enterococcus casseliflavus
  REGION 1..167: note = tr|A0A4V0GKD6|A0A4V0GKD6_ENTCA Isochorismatase; OS = Enterococcus casseliflavus OX=37734 GN=NCTC7179_00664; PE = 4 SV=1
MLVIVDMQNQILDEANEAYVPDSAALVKRIAKRLEQARVNGEYILHTRDIPIEVKGTPDEEAAALQLIPELKPLENEKVVKKYYYSIPPEVLIDIKKNLFKPEEEKKIEITGVETNICVLSNTIEIQSAFPDADFTINKTLVAGKNHESQGLDILRDFNVQIIDGTK

SEQ ID NO: 92551 - protein, 163 aa, Enterococcus durans
  REGION 1..163: note = tr|A0A377L3E2|A0A377L3E2_9ENTE Isochorismatase; OS = Enterococcus durans OX=53345 GN=NCTC8130_01638 PE=4 SV=1
MLVIIDMQNQVLDPTSDFYVPGSEELVDRIAQRLAKARENNELVLFTRDIPIEKKGVEEEIPALQLIPKLAPLPNERVIKKYYFTLPPEKLIELKKQLFDRKDEQKSIEVVGIETNLCVLSNTIALQSAFPEADFFLDPGLLSENQHGKMVIELLKDFNVSIL

SEQ ID NO: 92552 - protein, 208 aa, Enterococcus faecium
  REGION 1..208: note = tr|Q3Y2B2|Q3Y2B2_ENTFD Isochorismatase; OS = Enterococcus faecium (strain ATCC BAA-472 / TX0016 / DO) OX=333849 GN=entB2 PE=4 SV=1
MFNNKNTAVVLTDPQVEFLKPAGGGFGLTKDILEKYNTIENMIEMVKQAKEKGYKLFISPHYFYPHDHKWQFGGAGEHMMLEQQMFARKSQYESVEEGSGADFIEELKPYLDENTIISSPHKIFGPESNDLALQLRKNGIDTVILGGMNGNLCSDSHMRELVESGFNVVVATDAIGAPGQEAMDAALTNFGFIADQVMTTEEVLEQLS

SEQ ID NO: 92553 - protein, 169 aa, Enterococcus gallinarum
  REGION 1..169: note = tr|A0A376H7B1|A0A376H7B1_ENTGA Isochorismatase; OS = Enterococcus gallinarum OX=1353 GN=NCTC12360_03625 PE=4; SV = 1
MLVVIDMQNQIRDENSQSFISDSPALIKRIAKRLQQARAEGEYILFTRDIPIDCKDTPDEEQEALQIVPELQPLPNEKVIKKYYFSIPPEVLLEIKEQLFNDKNEQKHIEVTGVETNICVLSNTIEIQSAFPEADFLINQQLVSGRNHESSGLKILQDFNVEVVDRTDN

SEQ ID NO: 92554 - protein, 165 aa, Enterococcus hirae
  REGION 1..165: note = tr|A0A4U9QUG2|A0A4U9QUG2_ENTHR Isochorismatase; OS = Enterococcus hirae OX=1354 GN=NCTC12367_01957 PE=4 SV=1
MLVIIDMQNHILDPNSEFYIPESDQLAERIAQRLAKARQNNEYILFTRDIPVELKDKEEEREDLQLIPLLSPQENERVIKKYYFTIPPETLAEIQETLFESKEEQKEIEVVGIETNLCVLSNLIGLQSAFPEADFFVDPMLVSSRKHGESALELLKDFNVSIVES

SEQ ID NO: 92555 - protein, 169 aa, Enterococcus saccharolyticus
  REGION 1..169: note = tr|A0A449EXY1|A0A449EXY1_9ENTE Isochorismatase; OS = Enterococcus saccharolyticus OX=41997 GN=NCTC8741_02398; PE = 4 SV=1
MLVVIDMQNQIRDENSQSFISDSPALITRIAKRLQQARAEGEYILFTRDIPIDCKDTPDEEQEALQIVPELQPLPNEKVIKKYYFSIPPEVLLEIKEQLFNDKNEQKHIEVTGVETNICVLSNTIEIQSAFPEADFLINQQLVSGRNHESSGLKILQDFNVEVVDRTDN

SEQ ID NO: 92556 - protein, 173 aa, Enterococcus sp.
  REGION 1..173: note = tr|T0VD30|T0VD30_9ENTE Isochorismatase; OS = Enterococcus sp. HSIEG1 OX=1316414 GN=HSIEG1_2116 PE=4; SV = 1
MQDILIIVDLQKGVCSNNGTKLDHLDSLLLFANQRIQTYRHAQRPVLFVQHEEEELGYQTDEWLLHPDLAVQATDLFLRKTHANSFFNTSLQSLLTKHHVRSIEWIGAQTEFCMDGTIKFAHGLGYQNVLYQQATTTYASEGWSAAEIIHWYERIWQDRYAQILALPKNSEKK

SEQ ID NO: 92557 - protein, 284 aa, unidentified
  source 1..284: note = Erwinia gerundensis
  REGION 1..284: note = tr|A0A0U5KYZ4|A0A0U5KYZ4_9GAMM Isochorismatase; OS = Erwinia gerundensis OX=1619313 GN=entB PE=4 SV=1
MTIPKLADYALPDAADLPQNKVQWAFEPPRAALLIHDMQDYFLNFWGENSPMIQQVVENIACLRRYCKAQGVPVFYTAQPNEQSDADRALLNDMWGPGLNKHPEQQKVAAALAPDADDHVLVKWRYSAFHRSPLEETLHEMGRDQLIICGVYAHIGCLTTATDAFMRNIKPFMVADALADFTREEHMMALTYTAGRSGRVVMTRDLMPLPLDKAELRAMVLPLLEDDDQPEDDDNLIDYGLDSVRVMTLAARWRQVHADIDFVSLAKDPSINGWWALLSREPQP

SEQ ID NO: 92558 - protein, 284 aa, Erwinia piriflorinigrans
  REGION 1..284: note = tr|V5Z339|V5Z339_9GAMM Isochorismatase OS=Erwinia piriflorinigrans CFBP 5888 OX=1161919 GN=cbsB PE=4 SV=1
MTIPKLDNYALPTAAELPKNKVSWAFEPARAALLIHDMQEYFLNFWGEDSPLIKQVVANIAQLRQYCKSQNIPVFYTAQPNQQSDEDRALLNDMWGPGLNKHPAQQNVVTALAPDEQDQVLVKWRYSAFHRSPLESMLKEAGRDQLIICGVYAHIGCLTTAIDAFMRNIKPFMVADALADFSREEHMMSLTYAAGRCGRVVMSETLLPVPQSKQQLRALVLPLLDDDADDLDDSENLIDYGLDSVRMMALAARWHQVHSDIDFVTLAKNPSINGWWSLLSGDAA

SEQ ID NO: 92559 - protein, 272 aa, Erythrobacter citreus
  REGION 1..272: note = tr|A0A0L1KEE0|A0A0L1KEE0_9SPHN Isochorismatase; OS = Erythrobacter citreus LAMA 915 OX=1306953 GN=J121_2456; PE = 4 SV=1
MTCDTITRQRLAAAALASVATIALTVASAVPATAQPRAVSATQPPVDDGLPMPGFDVEPGRTALVITDPQNDFLSPDGVTWGVVGESITANRTVENIENLFLAADRHGMPIFISPHYYFEHDHRWQFEGTLETLMHGIGMFDRPHALTLEGFAGSGADWLERYKPIIENGRTVVTSPHKVYGPDSNDLVLQLRKAGISKVILGGMSSNLCTESHMRALIEAGFEVMVVTDATAGAITEHYDGYAASLVNFRMIASKVDNTASTLRSIATAYE

SEQ ID NO: 92560 - protein, 227 aa, Erythrobacter gangjinensis
  REGION 1..227: note = tr|A0A0G9MRS1|A0A0G9MRS1_9SPHN Isochorismatase; OS = Erythrobacter gangjinensis OX=502682 GN=AAW01_11355; PE = 4 SV=1
MAEQVGTKMVDDGRTAREIFEEVMANPARKKFGFGEKLAIVNVDPQQAYTRLDMFKTSYETDPRQIEYINTISRLARERGMPVIWSHVAYKNDAGDAGVWGTRTDTEDSLQNIKYGSDRHAFDPRCDIHDDDMQFTKRMPSAFFETPLASYLVWNKVDTVVVTGGSTSGCVRATAVDALSHGYRTIVPIETCSDKHASFHFANLTDLQLKYADVEPVQTVIDWFEAR

SEQ ID NO: 92561 - protein, 285 aa, Escherichia albertii
  REGION 1..285: note = tr|B1EKD7|B1EKD7_ESCAT Isochorismatase; OS = Escherichia albertii (strain TW07627) OX=502347 GN=entB; PE = 4 SV=1
MAIPKLQAYALPESHDIPKNKVDWAFEPQRAALLIHDMQDYFVSFWGENCPMMEQVIANIAALRDYCKQSNIPVYYTAQPKEQSDEDRALLNDMWGPGLTRSPEQQKVVERLTPDADDTVLVKWRYSAFHRSPLEQMLKESGRNQLIITGVYAHIGCMTTATDAFMRDIKPFMVADALADFSRDEHLMSLKYVAGRSGRVVMTEELLPAPIPASKEALREVILPLLDESDEPFDDDNLIDYGLDSVRMMSLAARWRKVHGDIDFVMLAKNPTIDAWWKLLSREVK

SEQ ID NO: 92562 - protein, 285 aa, Escherichia coli
  REGION 1..285: note = tr|B7L8H8|B7L8H8_ECO55 EntB protein OS=Escherichia coli (strain 55989 / EAEC) OX=585055 GN=entB PE=4 SV=1
MAIPKLQAYALPESHDIPQNKVDWAFEPQRAALLIHDMQDYFVSFWGENCPMMEQVIANIAALRDYCKQHNIPVYYTAQPKEQSDEDRALLNDMWGPGLTRSPEQQKVVDRLTPDADDTVLVKWRYSAFHRSPLEQMLKESGRNQLIITGVYAHIGCMTTATDAFMRDIKPFMVADALADFSRDEHLMSLKYVAGRSGRVVMTEELLPAPVPASKAALREVILPLLDESDEPFDDDNLIDYGLDSVRMMALAARWRKVHGDIDFVMLAKNPTIDAWWKLLSREVK

SEQ ID NO: 92563 - protein, 285 aa, Escherichia fergusonii
  REGION 1..285: note = tr|B7LLK5|B7LLK5_ESCF3 Isochorismatase; OS = Escherichia fergusonii (strain ATCC 35469 / DSM 13698 / CDC 0568-73) OX=585054 GN=entB PE=4 SV=1
MAIPKLQAYALPESHDIPHNKVNWTFEPQRAALLIHDMQDYFVSFWGENCPMMEQVIANIAALRNYCKQHNIPVYYTAQPKEQSDEDRALLNDMWGPGLTRSPEQQKVVDRLTPDADDTVLVKWRYSAFHRSPLEQMLKESGRNQLIITGVYAHIGCMTTATDAFMRDIKPFMVADALADFSRDEHLMSLKYVAGRSGRVVMTEELLPAPIPSTKAALREVILPLLDESDEPFDDDNLIDYGLDSVRMMALAARWRKVHGDIDFVMLAKNPTIDAWWKLLSREVK

SEQ ID NO: 92564 - protein, 285 aa, unidentified
  source 1..285: note = Escherichia marmotae
  REGION 1..285: note = tr|A0A2B7MIA6|A0A2B7MIA6_9ESCH Isochorismatase; OS = Escherichia marmotae OX=1499973 GN=entB PE=4 SV=1
MAIPKLQAYALPESHDIPQNKVDWAFEPQRAALLIHDMQDYFVSFWGDNCPMMEQVIANIAALRDYCKQHNIPVYYTAQPKEQSDEDRALLNDMWGPGLTRSPEQQKVVDRLTPDADDTVLVKWRYSAFHRSPLEQMLKESGRNQLIITGVYAHIGCMTTATDAFMRDIKPFMVADALADFSRDEHLMSLKYVAGRSGRVVMTEELLPAPIPASKAELREVVLPLLDESDEPFDDDNLIDYGLDSVRMMALAARWRKVHGDIDFVMLAKNPTIDAWWKLLSREVK

SEQ ID NO: 92565 - protein, 229 aa, Ewingella americana
  REGION 1..229: note = tr|A0A085GMT7|A0A085GMT7_9GAMM Isochorismatase; OS = Ewingella americana ATCC 33852 OX=910964 GN=GEAM_0560; PE = 4 SV=1
MSEFTINADPYRWPFDGSLSAANTALIVIDMQTDFCGKGGYVDTMGYDIALTRAPIAPIASVLAAMRAQGFTIIHTREGHRPDLSDLPANKRWRSKQIGAEIGFAGPCGRILVRGEPGWEIIPELAPLANETIIDKPGKGSFYATDLELVLHTRGIKNLIITGITTDVCVHTTMREANDRGFECMVLSDCCAATEQKHHEAALSMIKMQGGIFGAVTDSATLLDALATA

SEQ ID NO: 92566 - protein, 181 aa, Ferroplasma sp.
  REGION 1..181: note = tr|T0NG32|T0NG32_9EURY Isochorismatase (2,3 dihydro-2,3 dihydroxybenzoatesynthase) OS=Ferroplasma sp. Type II OX=261388 GN=AMDU4_FER2C00014G0015 PE=4 SV=1
MAVENKSCILVVDMINDFVTGKFGNQNAIDAVKMAENTLKKLKGHLPIIFARDAHMVNDPEFRVWGEHAVEGTEGSEIVKSLSEFPDFILKKRHYDAFFGTDLDSLLRALEIKNIYIFGISTDICVEHTCAGAFYRYYNVKVVSDLCACIDQSRQISSLNNIKINYGYMPVKSEELLKEAL

SEQ ID NO: 92567 - protein, 186 aa, unidentified
  source 1..186: note = Firmicutes bacterium
  REGION 1..186: note = tr|A0A1V6A520|A0A1V6A520_9FIRM Putative isochorismatase OS=Firmicutes bacterium ADurb.Bin153; OX = 1852883 GN=phzD PE=4 SV=1
MVKKLKADPLSSVLVAVDMQDKVIDITWDRDIVRPRAAALASIARALGVPVIKLEHVPEKMGRTTPTLEEVMSDIDPIAKSSFSAFGCEEFVDALKAANKKQVIIYGVEAHVCLCQTVLDALEEGYSVFVVADASSSTSPYHRDIAYDRMRHAGAIVATAQSIAFELIGRADRPEFRQLLPYIKQL

SEQ ID NO: 92568 - protein, 192 aa, Francisella hispaniensis
  REGION 1..192: note = tr|F4BKE0|F4BKE0_9GAMM Isochorismatase; OS = Francisella hispaniensis OX=622488 GN=FN3523_0777 PE=4; SV = 1
MKNTFVIVADFINEIIDERGALGVHNAQRIKDGKTMQKANKLIAWARDNNIQIAHVKVGFSKGYKECSKVSPMFAKAPEYGILQLNTWSTEFHHEMDVQEHDIIITKHRVSALYGTDLELILRANNIEHVVICGVSTSYVVESTARDLHDRDFKVTVIADACNAATQQAHEASLANLSRIANIINIDDFISC

SEQ ID NO: 92569 - protein, 197 aa, Francisella noatunensis
  REGION 1..197: note = tr|I2AZW9|I2AZW9_FRANT Isochorismatase hydrolase family protein OS=Francisella noatunensis subsp. orientalis (strain Toba 04) OX=1163389 GN=OOM_1301 PE=4; SV = 1
MKNKIVIVADFINEIVDEKGVFGAHNAKRVKDDKTMEKANQLITWARENNIMIAHVKVGFSKDYKECSKVSPMFKQVPEYGVFQLGTWATDFHPSMDVQEHDIIITKHRVSALYGTNLEVVLRANNVQDVIICGVSTSYVVESTARELHDRDYRVMVVADACNASSQETHEASLSNLNKIARIVCVDNLLKGECFGN

SEQ ID NO: 92570 - protein, 197 aa, Francisella sp.
  REGION 1..197: note = tr|F8G940|F8G940_FRAST Isochorismatase; OS = Francisella sp. (strain TX077308) OX=573569; GN = F7308_1603 PE=4 SV=1
MKNKIVIVADFINEIVDEKGVFGAHNAKRVKDDKTMEKANQLIAWARENNIMIAHVKVGFSKDYKECSKVSPMFKQAPEYGVLQLDTWATDFHPDMDVQEHDVIITKHRVSALYGTNLEVVLRANSIQDIIICGVSTSYVIESTVRELHDRDYSVTVVADACNASSQESHEASLSNLNKIAKITCVDNLLKGECFGN

SEQ ID NO: 92571 - protein, 235 aa, Frankia alni
  REGION 1..235: note = tr|Q0RCA2|Q0RCA2_FRAAA Isochorismatase OS=Frankia alni (strain ACN14a) OX=326424 GN=dhbB PE=4 SV=1
MSARPYDFTFDPATTALVVIDMQRDFLEPGGFGESLGNDVSQLRSTIEPLQAVLAAVRAAGLTVIHTREGHLPDLSDLPPAKLHRGDAALRIGDLGPKGRILIRGEYGQDIIDELAPVDGEYVIDKPGKGAFYATAFGDVLAEKGITSLVVAGVTTEVCVHTTVREANDRGFECLVLSDCVGSYFPEFQRVALEMVAAQGGIFGWVAPSADFLAALAASTPAADSTLPAPAVTAS

SEQ ID NO: 92572 - protein, 251 aa, Frankia sp.
  REGION 1..251: note = tr|A8L0C2|A8L0C2_FRASN Isochorismatase OS=Frankia sp. (strain EAN1pec) OX=298653 GN=Franean1_3619 PE=4 SV=1
MGITPIESYPMPTPADLPANIASWRVEPERAVLLIHDMQHYFLAPFARGAQPHTDLVHNVRALRERCAQLGIPVMYSAQPGGMSSRDRGLLADFWGPGMTAQARDRGIPDELAPAPADTVLTKWRASAFHRSPLLELMRDAGRDQLIVCGVYAHVGVLLTAADAFANDIQAFVVADAVADFTPEFHRMALDYVAIRCGAAVVAADVLGWLGASGAASAASASASTATATATAAGSPAGVFAVANGGGEERR

SEQ ID NO: 92573 - protein, 83 aa, Frigoribacterium sp.
  REGION 1..83: note = tr|A0A1R4GMW3|A0A1R4GMW3_9MICO Isochorismatase of siderophore biosynthesis OS=Frigoribacterium sp. JB110; OX = 1434829 GN=CZ774_17120 PE=4 SV=1
MRLSTEQVIADVADVLYLDPAAVDYEVSLRDQGMDSVRLMDLVERWRSAGVERIDFITLAENSKLGEWIEVLETLQDGGEVAP

SEQ ID NO: 92574 - protein, 206 aa, unidentified
  source 1..206: note = Fuerstia marisgermanicae
  REGION 1..206: note = tr|A0A1P8WM09|A0A1P8WM09_9PLAN Vibriobactin-specific isochorismatase OS=Fuerstia marisgermanicae OX=1891926; GN = vibB PE=4 SV=1
MSMPEQTANPTFHARSPELLSVPRSQLLIVDVQEKLLPVIAEGDPLLATIGFLLDVANILQVPAFVSEQYPKGLGKTVPAIAGHDIQSTTFEKLRFSAAEGLRAARSASDERSSRDQVVVVGIEAHICVLQTTLDLIAAGLRVFVVADGVGSRNVADRDTALKRIRDCGGVVCTAESVAFEWCEVAGTDQFKSISRLVRDRTHVAT

SEQ ID NO: 92575 - protein, 162 aa, Fusibacter sp.
  REGION 1..162: note = tr|A0A1B6BHX8|A0A1B6BHX8_9FIRM Isochorismatase; OS = Fusibacter sp. 3D3 OX=1048380 GN=F3D3_3968 PE=4 SV=1
MSKVAFLIVDMQNNVKESTPCKATFEKAVEYINEISQFFRQKNLPVIIIQDVEAGGAETEGFKCVAELVVSDTDFFVHKSYSNAFWKTELDTLLKNAGVDCTVISGFAAEHCVLFTYNGAIERGYDAFLLQNGIAGFDDDEIKRIQLLRSVISYEALEYFLK

SEQ ID NO: 92576 - protein, 183 aa, unidentified
  source 1..183: note = Unknown
  REGION 1..183: note = tr|A0A126QFL8|A0A126QFL8_9GAMM Isochorismatase; OS = gamma proteobacterium 10BT OX=1778877 GN=iscM PE=4 SV=1
MLIDPHKATLLVVDIQEKLIDAMSDPEGTRARARWLLAATAELELPTVISEQYPKGLGHTLAPLLAAAPAAEVVEKSHFSCVAAGCLPASLMAREQVIVCGMETHVCVLQTVLGLLALGKQVFVVEDACDSRTAASKAAGLARMREAGAQVVTREMVLFELMGSAGHPLFRHISKTYLVGEQP

SEQ ID NO: 92577 - protein, 262 aa, Gemmata sp.
  REGION 1..262: note = tr|A0A142X8H0|A0A142X8H0_9BACT Vibriobactin-specific isochorismatase OS=Gemmata sp. SH-PL17 OX=1630693 GN=vibB; PE = 4 SV=1
MNVAVVDEGANLVAFVRMDGAWQGSIEIALNPETTAKGHHLLLSSGYAALLRWEQLPEERVMPGMSENLHGSAPDRSPVALVLVDVINPLDFPEADQLLRFAIPAADRLAELKQRAKRAGVPVVYANDNFGRWRSDLSTVVECCREPGCKGAALVERLRPERDDYFVLKPKHSAFFSTTMNTLLRYLGVRTVVLGGFAADICVLFTANDAYMRDFRIVIPSDGVASNDSADRDAVLALMRRVLKAETPKVDEIDFVALAKEP

SEQ ID NO: 92578 - protein, 306 aa, Geobacillus sp.
  REGION 1..306: note = tr|A0A0F6BHX1|A0A0F6BHX1_GEOS0 Isochorismatase; OS = Geobacillus sp. (strain Y4.1MC1) OX=581103; GN = GY4MC1_0170 PE=4 SV=1
MAIPAIPAYPMPVSSELPKNKVSWTPAAKRAALLIHDMQNYFLDAFPSNASPFVELVRNIQRLKKECKEMGIPVIYSAQPGGQTLEQRGLLQDFWGNGIADDPYQKGIIDELAPDAKDIVLTKWRYSAFKKTNLLEILEGHGRDQLIICGVYAHIGCLLTASDAFMQDIQVFFVADAVADFSLEHHKMALHYAASRCAFITPTQHLIEALKKEPVPDCQNILPMSLHDVRNQVAELIQESPADLSDHENLVNRGLDSIRMMSLVEKWRRAGAEVTFAALAARPTLFAWWNLLSSQSEKVLSAQDSQ

SEQ ID NO: 92579 - protein, 300 aa, Geobacillus thermodenitrificans
  REGION 1..300: note = tr|A0A1W6VMC9|A0A1W6VMC9_GEOTD Vibriobactin-specific isochorismatase OS=Geobacillus thermodenitrificans; OX = 33940 GN=vibB PE=4 SV=1
MGIPAIPAYPMPSLSELPKNKVLWKLDPKRAVLLIHDMQNYFLDAFTPNASPLVELVSHIQQIKRECKKLGIPVVYSAQPGGQTPEERGLLQDFWGKGIADDSYQKGIIDDLAPDDDDIVLTKWRYSAFKKTPLSEILKEQGRDQLIICGVYAHIGCLLTASDAFMQDIQVFFIADAVADFSREHHQMAIQYAASRCAFTMSTQQLLDVLKRTQNPLPLSLEDVRRQVAELLQAEAADLSDQENLIDRGLDSIRIMSLVEKWRRAGAKVTFADLAARPTLSDWWNLLYFPREKVLSNQDA

SEQ ID NO: 92580 - protein, 187 aa, unidentified
  source 1..187: note = Gilliamella apicola
  REGION 1..187: note = tr|A0A066T5E4|A0A066T5E4_9GAMM Isochorismatase; OS = Gilliamella apicola OX=1196095 GN=A9G32_08255 PE=4 SV=1
MKQGLIIIDVQNDYFPTGKFTLNNTELTLQNTLKLQKHFRAQQLPIFYIQHIKSDPHADFFANGSLGAEIHPSLLPLGNLHEYLVKKTFPNSFYQTELQKKLQQEQIQQMVICGMMSHMCVDSTTRHASELGYQPILIHDACTTCDLEFDGKTIPSQVVHNNFMSALTNFASVVSCEMFVQTKLAIL

SEQ ID NO: 92581 - protein, 221 aa, Gluconobacter cerinus
  REGION 1..221: note = tr|A0A1B6VFX0|A0A1B6VFX0_9PROT Hydrolase; OS = Gluconobacter cerinus OX=38307 GN=A0123_03248 PE=4 SV=1
MLLLECLLNLLTFPRVPDNGPGWRSNVNREGLAMISLPATRTALVLIDLQKGITGLPLAPTPGTAIVKRSKELAARFRAAGAPVILVNVAFAPDFADAVHATVDRSFSPPGGFAPDWAELVDGLAEPTDLRVTKRQWGAFYGTDLDLQLRRRDITTIVLGGIATNLGVESTARAAHEHGYNVVLAADVMSTFTEEMQRFACEEIFPRLGRVTTSDAIALDA

SEQ ID NO: 92582 - protein, 188 aa, Gluconobacter japonicus
  REGION 1..188: note = tr|A0A177FXD3|A0A177FXD3_GLUJA Hydrolase; OS = Gluconobacter japonicus OX=376620 GN=A0J51_02984 PE=4; SV = 1
MISLPATKTALVLIDLQKGIVGLPLAPTPGATIVERSKELAMRFRAAGAPVILVNVAFAPDFADAVHAVVDRNFSPPGGFAPDWAELVDGLAEPTDLRVTKRQWGAFYGTDLDLQLRRRGITTIVLGGIATNLGVESTARAAHEHGYNVVLAEDVMSTFTDQMQRFACEEIFPRLGRVTTSEAIALDA

SEQ ID NO: 92583 - protein, 188 aa, Gluconobacter oxydans
  REGION 1..188: note = tr|Q5HXW1|Q5HXW1_GLUOX Putative isochorismatase; OS = Gluconobacter oxydans (strain 621H) OX=290633; GN = GOX2578 PE=4 SV=1
MISLQATKTALVLIDLQKGITGLPLAPTPGALIVERSKELTARFRAAGAPVILVNVAFSPDFADAVHAVVDRSFSPPGGFAPDWAELVDGLAEPTDLCVTKRQWGAFYGTDLDLQLRRRGISTIVLGGIATNLGVESTARAAHEHGYNVVLATDVMSTFTEEMQRFACEEIFPRLGRVTTSDAIALDA

SEQ ID NO: 92584 - protein, 218 aa, unidentified
  source 1..218: note = Glutamicibacter arilaitensis
  REGION 1..218: note = tr|E1W0T7|E1W0T7_GLUAR Isochorismatase; OS = Glutamicibacter arilaitensis (strain DSM 16368 / CIP 108037 / IAM 15318 / JCM 13566 / Re117) OX=861360 GN=dhbB; PE = 4 SV=1
MGLPTIPGYRLPDGQLPEPRVTWKADAQRAVLLIHDMQRYFIEAFDHEDPRSQIRVTLKNIRALRDAADDAGVPVVYTAQPPNQKPADRALLTDFWGTGLTNDGREEITQELAPRTGDLVLTKWRYSAFAKTELQEWMRQAGRDQLLITGVYAHIGCLTTALDAFMRDIQPFFIADAQADFSLEEHQMAINYGYGRCASVVNSATVLKQMQAALVATR

SEQ ID NO: 92585 - protein, 266 aa, unidentified
  source 1..266: note = Glycine soja
  REGION 1..266: note = tr|A0A0B2P977|A0A0B2P977_GLYSO Peroxyureidoacrylate/ureidoacrylate amidohydrolase RutB; OS = Glycine soja OX=3848 GN=D0Y65_016621 PE=4 SV=1
MVKTVVWSTFVRPQYKPAHFNHSPLPFLKLSTPNLSFRGTNTVHNKRSNWPKPLSLRSKSVLAVAGADPLEMAEDWNRTALLVIDMQKDFIEDGGPMLVKGGKDIVPNVIKAVDVARQRGILIVWVVREHDPLGRDVELFRRHLYAAGKVGPTSKGSEGAELVDGLVIKEGDYKLVKTRFSAFFATHLHSVLQGAGINSLVVTGVQTPNCIRQTVYDAVALDYQPVTVIVDATAAATPDIHLANVFDMENIGVATPTLQEWSEPKA

SEQ ID NO: 92586 - protein, 216 aa, Gordonia bronchialis
  REGION 1..216: note = tr|D0L278|D0L278_GORB4 Isochorismatase OS=Gordonia bronchialis (strain ATCC 25592 / DSM 43247 / JCM 3198 / NCTC 10667) OX=526226 GN=Gbro_0639 PE=4 SV=1
MPIPPIRPYEIPDPADLPPRRDGWSTDPQRSILLIHDMQSYFVDAFEGAPLPDVVANIRAIRDTCDRLSIPTVYSAQPPRQDPEVRGLLTERWGTGIATDDEAAIVAPLAPRPDDLHTVKWRYSAFVRSDLGQTMQELGRDHLIITGIYAHIGCMLTAADAFMRDIRPFLVSDAVADFSAAEHRHTVKYVNEACGAALTTAELLKDLGGTTVDPAC

SEQ ID NO: 92587 - protein, 228 aa, Gordonia polyisoprenivorans
  REGION 1..228: note = tr|H6N1R7|H6N1R7_GORPV Isochorismatase OS=Gordonia polyisoprenivorans (strain DSM 44266 / VH2) OX=1112204; GN = GPOL_c23560 PE=4 SV=1
MSIPPIAPYQIPVGPFPARVEWTLQPERAALLIHDMQRYFIDAYRLDHEPMATALPNMIAIREACSAAGVPVVYTAQPGDQHPSRRGILSDFWGKGLSSGRDEEIIEQLTPRDGDICVTKWRYSGFQRTDLRQLLAHHGRDQLIIVGVYAHMGCMISATDAFMSDVAPFFVVDAMGDFSRDEHRMAAEYIGKRAGRVVRAAQVLRAVQVAATEHASDGVGTDRSGVTA

SEQ ID NO: 92588 - protein, 192 aa, Gordonia sp.
  REGION 1..192: note = tr|A0A3G8JGU5|A0A3G8JGU5_9ACTN Isochorismatase; OS = Gordonia sp. MMS17-SY073 OX=2420509 GN=dhbB_1 PE=4 SV=1
MQRYFIDAYQVDREPMATALPNMIRIREACRRAGVPVVYTAQPGDQHPSRRGILADFWGTGLEAGRDEEVIPELAPDAGDITVTKWRYSGFQRTDLRQLLAHHGRDQLIVVGVYAHMGCMISAAEAFMSDVAPFFVVDGMGDFTRDEHQMAAEYIGKRAGLVVTSDHVVKSLAMTAATASDHPDVVATGSTR

SEQ ID NO: 92589 - protein, 196 aa, unidentified
  source 1..196: note = Gottschalkia acidurici
  REGION 1..196: note = tr|K0B2T5|K0B2T5_GOTA9 Isochorismatase EntB; OS = Gottschalkia acidurici (strain ATCC 7906 / DSM 604 / BCRC 14475 / CIP 104303 / NCIMB 10678 / 9a) OX=1128398; GN = entB PE =4 SV=1
MSKNNLHKIKKEECALIIIDMQNDFIREGAPIECPGGRDIIPNIQKAKRWAKENDIPVFYTQEMHRFQKVDYGLELERDEPQHCLEGTEGVEIIEELKPEDDDYVIIKRRYSGYYLTDLEVLMRSFNKKALILTGAATNVCVYATALDAVQRDVKSVVLSDGVAGTSIELHEAFLKNIDYVIGDVVTVDELIKELN

SEQ ID NO: 92590 - protein, 179 aa, Grimontia hollisae
  REGION 1..179: note = tr|D0I9X5|D0I9X5_GRIHO Isochorismatase OS=Grimontia hollisae CIP 101886 OX=675812 GN=VHA_002550 PE=4 SV=1
MLSRKNTGLVVVDVQGKLARLVHDSERVIANCETLVKGARALGLPIILLEQNPDKLGCTVDELKAHLDGVDPISKFTFNACEAPEFLEAVKAMKADTWLICGIEAHICVYQTARGLVDAGFNVELVSECVSSRTLSNVQLGINRSKDNGVTITGLEMCLYELVQDCRHPVFKQILSLVR

SEQ ID NO: 92591 - protein, 290 aa, unidentified
  source 1..290: note = Gynuella sunshinyii
  REGION 1..290: note = tr|A0A0C5V5U2|A0A0C5V5U2_9GAMM Isochorismate hydrolase OS=Gynuella sunshinyii YC6258 OX=1445510; GN = YC6258_02767 PE=4 SV=1
MSIPSLTDYSMPTTESLPANKVNWSLEPAKAVLLIHDMQDYFLKFYPHDSRLIRQLIENIDTLKTFCRQHEIPVVYTAQPDNQSPRDRALLNDMWGAGVNDHAGLKKICAALTPDSHDTVLVKWRYSAFQRSILENMMKELGRDQLIICGIYGHIGCMITAVDAFMRDIKPFMVADAIADFSEQDHRMALNYVATRAGTVISTTAIVESGEKRSQLTLAQLKAQLLSAIDENEDDFDADENLVDYGLDSVQMMSMVNDWRKQGIEINFAELAKNPSLNAWWKLIGEKQAG

SEQ ID NO: 92592 - protein, 327 aa, Haliangium ochraceum
  REGION 1..327: note = tr|D0LFW3|D0LFW3_HALO1 Isochorismatase OS=Haliangium ochraceum (strain DSM 14365 / JCM 11303 / SMP-2) OX=502025; GN = Hoch_2020 PE=4 SV=1
MGIPRITPYPLPQPSALPENRVSWSLAPARAVLLIHDMQEYFLDYYDASASPAREMVAHIDQLRTRCAALGIPVVYSVQPAEQTPEERGLLTDMWGPGLVAKPHKQAVVSALAPRAGDVTLTKWRYSAFQRTDLRELLRRWGRDQLIICGVYAHIGCLMTAGEAFMSDVQPFLVSDATADFDREKHLMAIEWVAQRCGVALSTGDALAALAEQAPTQTATPVETGQASASGISLERLRSDIAEILEEPAEDIADDDNLLDLGLDSIRLMSLVERWRAQGAELSFVELAERPSIADWWTILSAPMPLAADAVASARAEAGTAPQAEER

SEQ ID NO: 92593 - protein, 221 aa, Haliea sp.
  REGION 1..221: note = tr|A0A455R701|A0A455R701_9GAMM Isochorismatase; OS = Haliea sp. ETY-M OX=1055105 PE=4 SV=1
MEHSDKTAREIYQDIKANPARKRFGFGSKAALVNVDPQKAYTRTDLFKTAYETDPRQLEYVDTLATKFRALGWPVVWTHVAYMESGEDAGIWGTRTDTEDSLQNIKFGSERSEFDDRLNIDRERDVIYLKKMPSAFFETPLQSLLVWHQVDTLVITGGSTSGCIRATAVESLSRGYRTIVPEECVADKHESYHFANLTDLSLKYADVLEVQEVFDWLDGQG

SEQ ID NO: 92594 - protein, 190 aa, Haloarcula hispanica
  REGION 1..190: note = tr|G0HRF2|G0HRF2_HALHT Isochorismatase OS=Haloarcula hispanica (strain ATCC 33960 / DSM 4426 / JCM 8911 / NBRC 102182 / NCIMB 2187 / VKM B-1755) OX=634497 GN=entB2 P E=4; SV = 1
MELDPAQTALVVVDMQNGFCHPDGSLYAPDSEAAIEPCAELVDRAREAGAKVVFTRDVHPPDQFEDTHYYDEFDRWGEHVVEGSWETELVEDLDPQDEDLTVVKHTYDAFYQTELEGWLDAHGVTDLAICGTLANVCVLHTASSAGLRDYRPILVEDAVGYIEDDHREYALDHADWLFGELTDRGELAFA

SEQ ID NO: 92595 - protein, 185 aa, Haloarcula marismortui
  REGION 1..185: note = tr|Q5V0K2|Q5V0K2_HALMA Cysteine hydrolase; OS = Haloarcula marismortui (strain ATCC 43049 / DSM 3752 / JCM 8966 / VKM B-1809) OX=272569 GN=entB1 PE=4 SV=1
MVVLPETPVLVLVDFQQGFDESQWGTRNNPDAEANAARLLTAWRERSLPVAHVRHNSTEPDSPLRRGEPGFAFKRELSPEAGEATFEKRVNGAFIDTGLADWLRDTASETLVICGLTTDHCVSTTTRMAENRGFDVVVPGDATATFDRTLDGEHFDPDLVHRTALAQLRGEFATIATTDDVVASL

SEQ ID NO: 92596 - protein, 204 aa, Haloferax mediterranei
  REGION 1..204: note = tr|I3R714|I3R714_HALMT Cysteine hydrolase; OS = Haloferax mediterranei (strain ATCC 33500 / DSM 1411 / JCM 8866 / NBRC 14739 / NCIMB 2177 / R-4) OX=523841; GN = pncA PE=4SV=1
MTDDNATPTRTLELPADAVLDLPDDTALVCIDMQVGFDDPAWGDRNNPGMEARVSDLLTAWRETDRPVVHVRHDSTEPDSPLRSDGEGFGWKPESEPVGDEPTFTKHVNSGFIGTDLEAWLRERDYDTLVICGLTTDHCVSTTTRMAENLGFDVYLPADATATFDREGHDGQSYTADEMHRTALAHLHGEFATIVESAALLPTR

SEQ ID NO: 92597 - protein, 56 aa, Halomonas elongata
  REGION 1..56: note = tr|A0A1B8P1K7|A0A1B8P1K7_HALEL Isochorismatase; OS = Halomonas elongata OX=2746 GN=entB PE=4 SV=1
MAADENLLDYGLDSLQVMNLVAELKTLGVTLSFEELTRTPTLEAWWTLIEQKRLAA

SEQ ID NO: 92598 - protein, 199 aa, Halomonas sp.
  REGION 1..199: note = tr|A0A0P7Y2S3|A0A0P7Y2S3_9GAMM Amidase OS=Halomonas sp. HL-48 OX=1479235 GN=HLUCCA13_09395 PE=4 SV=1
MTTSITLRELLGLGHTPNKLSESALVLIDCQNTYREGVMQLEGVEDALLEAQKLLEKAREAGIPIIHIQHDTGEGTPYDIKAPIGQIADIVKPLNGEPVITKQFPNAFVQTDLEAQLREMGCNKLVLGGFMTHMCVNSTAHGAFNLGFDVTVVASATATRALEADNGKALSAQAVHEGALASTRDLYAAVVDNVDELPV

SEQ ID NO: 92599 - protein, 198 aa, Haloplasma contractile
  REGION 1..198: note = tr|U2DQN5|U2DQN5_9BACT Amidase nicotinamidase Secondary metabolites biosynthesi protein OS=Haloplasma contractile SSD-17B OX=1033810 GN=HLPCO_003081 PE=4 SV=1
MLNKNETALLIIDMQYGGGAPDGSLVQMLNVDVAKQEDIVTPMVKLKDFFNNNDMLVVNVKTEYEEDFSDWKMLDKRFEVKKYKHFVKGSADAEIIPPLAPREGEELIVKNRWNAFFNTNLDELLKSKDIKNLIIVGAATDVCVLETCSYAFSLNYNCIVPKETTASFNPERKHMGLELLNFGRSQVVSVDDVYSMFK

SEQ ID NO: 92600 - protein, 190 aa, Halorhabdus tiamatea
  REGION 1..190: note = tr|F7PJ06|F7PJ06_9EURY Isochorismatase / nicotinamidase family protein OS=Halorhabdus tiamatea SARL4B OX=1033806 GN=entB PE=4 SV=1
MEFDPDTTAVVVVDMQNGFCHQEGSLYAPASEDAIDPCVELIDRAGEMGASVVYTRDVHTDEQFEDAHYYDEFDRWGEHVLEGTWDAELVAKLKSRDADLIVEKHTYDAFHETQLDGWLTAHGIDDLLICGTLANVCVLHTAGSAGLRDYRPLLVEDAVGYLEEDHREYALEHADWLFGEVMDRESIAFA

SEQ ID NO: 92601 - protein, 217 aa, unidentified
  source 1..217: note = Hartmannibacter diazotrophicus
  REGION 1..217: note = tr|A0A2C9D1D7|A0A2C9D1D7_9RHIZ Putative isochorismatase OS=Hartmannibacter diazotrophicus; OX = 1482074 GN=phzD PE=4 SV=1
MPTASPIPGKALIAPDNHMLIMIDFQSQMSFATKSIDAVALRNNAALVARSAAGFKVPTILTTVAEKSFSGPMFTEITDAFPGQAMLDRTSMNTWEDGPVIGEVNRIGKDRVVLCGLWTSVCIVGPALSALHQGFEVYVIADACGDVSDEAHERAMQRMIHAGVRPMTSLQYLLELQRDWARTETYDMTTGIAKEYGGAYGLGIIYAKTMFGASESH

SEQ ID NO: 92602 - protein, 172 aa, unidentified
  source 1..172: note = Helicobacter ailurogastricus
  REGION 1..172: note = tr|A0A0K2XFT1|A0A0K2XFT1_9HELI Isochorismatase; OS = Helicobacter ailurogastricus OX=1578720 GN=HAL011_11470; PE = 4 SV=1
MANTLENPGVVLLIDVQERLFQAMAGADALLENSLRFLKIAKELAIPIVATEQNPQKLGATLEQLRPFCQQIYTKESFSARPALSLPKAPLFVLGIEAHVCVYQSVKDFLKEGFCVSVIAEGTSSRKPKDCALALEDLRAQGARIASVEMCAFEWLKTYTHPQFKTISKLIK

SEQ ID NO: 92603 - protein, 167 aa, Helicobacter bizzozeronii
  REGION 1..167: note = tr|F8KRS9|F8KRS9_HELBC Isochorismatase; OS = Helicobacter bizzozeronii (strain CIII-1) OX=1002804; GN = HBZC1_04820 PE=4 SV=1
MSCVLVVDIQEKLFPVMADKDLLLKNCTRFLKMARALEFPIYATEQNPAKLGPTLAPLKEYFTQEAWIKESFSAYPVFSAPHKPPLILLGIEAHVCVYQSAKDFLKHGYEVTLLADCTSSRDVQNKHLALEELKRLGARILSAEIVAFECMQTYTHPQFKTISQIIK

SEQ ID NO: 92604 - protein, 197 aa, Helicobacter canis
  REGION 1..197: note = tr|A0A377J4K9|A0A377J4K9_9HELI Isochorismatase hydrolase OS=Helicobacter canis OX=29419 GN=yecD PE=4 SV=1
MEHFSYGLFRLDSSALVVIDVQEKLVPAMWESSRIIHKTNTLLAGAAALQIPILITEQYPKGLGSTDPRIHFHPTLAPHPAESNTPQALVLEKVSFSIFGDEQITAHIQSLGVRNLLICGIESHICVLQSVLHARKLGFEVWVANDALSSRDPANHHNALQLMADSGAKITNVESILFGAMHTAKHPSFKTLSALIK

SEQ ID NO: 92605 - protein, 181 aa, Helicobacter cinaedi
  REGION 1..181: note = tr|I7HE76|I7HE76_9HELI Isochorismatase hydrolase; OS = Helicobacter cinaedi CCUG 18818 = ATCC BAA-847; OX = 537971 GN=HCBAA847_2182 PE=4 SV=1
MRTVLKAKKMLFVCVDIQERLLELMAHKESVVKNANILLQATQILQAPLLVTEQYPKGLGKTHSAIKIPANTPILEKTSFGIFGSEGIKNHIAKSKCKTLVFFGIESHICMLQSIVEARNLGYECYFVADASSSRNALNHDLALEFFRTIGVNVLPTEAILFRMLGDSKHEHFKAVSNLVK

SEQ ID NO: 92606 - protein, 259 aa, Helicobacter fennelliae
  REGION 1..259: note = tr|T1DUN6|T1DUN6_9HELI Isochorismatase; OS = Helicobacter fennelliae MRY12-0050 OX=1325130; GN = HFN_1646 PE=4 SV=1
MQYIQSSAQTYHVNNGLLIPQETLFVCVDIQTKLLGAMSYKERVLKNARTLLQGAKILNIPILITEQYPKGLGSTDESLGFKEFLIANNHSSDSNHNSPSQNLESSLNPNANSLDSRTNLDSRNLDSQAPNPQISNLKNPRATHLEIPQCTLMEKTSFSIFGDKSIADFIRQSKRTTLVFFGIETHVCVLQSVWHSVTLGLDVWVAEDALSSRNSDNHDNAIWLMRQKGAKITNTESILFGAMKDSKHPSFKAISALIK

SEQ ID NO: 92607 - protein, 169 aa, Helicobacter heilmannii
  REGION 1..169: note = tr|A0A0K2XM37|A0A0K2XM37_HELHE Isochorismatase; OS = Helicobacter heilmannii OX=35817 GN=HHE03_06780 PE=4; SV = 1
MQTLEKPLVLLIDLQERLFSAMHQKEALLENCLRFLQIAKELHIPTIATEQNPAKLGETLQELRPFCEEIYTKQSFSAYPVLKLKGPLFVLGIEAHVCVYQSVLDFLKAGFSVSVVAECVRSRKPTDCHLALEDLRAQGARVRSLEMCAFGWLQTYTHPQFKAISKLIK

SEQ ID NO: 92608 - protein, 185 aa, Helicobacter muridarum
  REGION 1..185: note = tr|A0A377PVK9|A0A377PVK9_9HELI Isochorismatase family protein OS=Helicobacter muridarum OX=216; GN = LS73_000575 PE=4 SV=1
MFNMNKEKALLLVVDIQERLSASMHKDEFALMLKKCNILINGCVALQVPIMQSLQYTKGLGNSVSGLFDSNTKKIDFEKRAFSCCYQDSPFLSYLQENKQISQIIICGMETHVCILQSARDLVSLGYNVIIPDDAVISRDYKNKKNALSLMQSMDITIANVESILFDMLKTSLSPEFKAISSLVK

SEQ ID NO: 92609 - protein, 189 aa, Helicobacter pullorum
  REGION 1..189: note = tr|A0A3S4Y1E8|A0A3S4Y1E8_9HELI Isochorismatase hydrolase OS=Helicobacter pullorum OX=35818 GN=yecD PE=4; SV = 1
MPSYIPKQQARLNPKECVFICIDIQEKLFNVMQNKDKMLKNANKLLEGAKTLGANSIVLEQYPQGLGKALLRNQENPKESLIEKISFSAFGEQNFCKALEKLQATTLILFGIETHICVKESAFDAKEKGFKVLIAEDACSSRELHSHSLAIQEMRDLKIQISSTESILFSFLLHAKETNFKAISTLIKN

SEQ ID NO: 92610 - protein, 181 aa, Helicobacter typhlonius
  REGION 1..181: note = tr|A0A099UDB0|A0A099UDB0_9HELI Isochorismatase; OS = Helicobacter typhlonius OX=76936 GN=BN2458_PEG1949 PE=4; SV = 1
MRSILKTKRTLFVCVDVQEKIIEHMAYKDKVIKNTNILLESATQLGIPTLVTEQYPKGLGKTHSTITIPKNARVLEKTSFGIFGDEKIASFIAQSKAKTLIFFGIETHICVLQSIIEARNLGYECLLAADACSSRDEQSHQLALNFFNTQGVVMLPTESILFRILGDCKHSSFKAISALIK

SEQ ID NO: 92611 - protein, 176 aa, Herbaspirillum seropedicae
  REGION 1..176: note = tr|D8IX19|D8IX19_HERSS 2,3-dihydro-2,3-dihydroxybenzoate synthetase (Isochorismatase) protein OS=Herbaspirillum seropedicae (strain SmR1) OX=757424 GN=entB PE=4 SV=1
MPTALLIIDIQHALCHGPDAVENSAAVIDRVNQLADQARAAGAPVIFVQHEDEDALQRGSEGWQLMPGLHQQPEDLHLPKRGSDAFHHTELQAMLKMRHISALVICGMQTEYCVESTVRRALALGYPVMLAADAHTTAPNGVLTVAQVIAHHHATLAGLGSYGVRASIRPVADIRF

SEQ ID NO: 92612 - protein, 285 aa, Herpetosiphon aurantiacus
  REGION 1..285: note = tr|A9B7R9|A9B7R9_HERA2 Isochorismatase; OS = Herpetosiphon aurantiacus (strain ATCC 23779 / DSM 785 / 114-95) OX=316274 GN=Haur_1804 PE=4 SV=1
MALPSIAAYAIPTELPTNRANWAAEPQRVALLIHDLQNYFIDAFPAGEEPISSVLRSIASLRDHAHALGIPVFYSAQPGDQAPEDRGLLSTFWGKGLSTGTPPEIVAPLAPQAGDQVITKWRYSAFQRTPLRELLREAGRDQLIVCGVYAHLGCLLTACDAFMQDIQPFFVADAVADFTLDEHRMALQYAAGRCAVVTTTEQLVRELGYNQLRSELHDLLDDVESIGADDNLLDWGLDSVRLMTLAERWRAAGCEVGFAELAETPTLAEWWQRRFAAPLLEQAHG

SEQ ID NO: 92613 - protein, 206 aa, Hoeflea phototrophica
  REGION 1..206: note = tr|A9D950|A9D950_HOEPD Amidase OS=Hoeflea phototrophica (strain DSM 17068 / NCIMB 14078 / DFL-43); OX = 411684 GN=HPDFL43_07889 PE=4 SV=1
MADSTRLDPARTALLTIDLQNDFLHPDGAYGRANQTAESITALPERIVPLRNALKAKGGTYFSAQFTLIPGPDGEPLIAPHLKQLRPFLAKGDFAPGNFGHDLVDPLKPANYTIEKVAYSAFYQTRLEYIMRALGIDTLLIGGIVTNGGVASTLRDAHLRNIDTILLTDGCAAFKDAVHQATLLSLSSLGSQMTCAQATALVECAA

SEQ ID NO: 92614 - protein, 187 aa, unidentified
  source 1..187: note = Unknown
  REGION 1..187: note = tr|A0A0W8G9Q4|A0A0W8G9Q4_9ZZZZ Isochorismatase; OS = hydrocarbon metagenome OX=938273 GN=ASZ90_000290 PE=4; SV = 1
MEKKTLLLIDIQNDYFPGGAFELDGAEAAGGNARLLLDHFRNAGRPVVHIRHESLRPGSTFFLPGTPGADIHPLVAPAPGEPVIRKHYPNSFRETGLQNELNRLEARRLVVAGMMTLMCVDATVRAAFDLGFELDVVHDACAAHALRFGDMDIPAQAVHGAFLAALGMVYARTPSTREFLGQDVPLG

SEQ ID NO: 92615 - protein, 302 aa, unidentified
  source 1..302: note = Hydromonas sp.
  REGION 1..302: note = tr|A0A345DB61|A0A345DB61_9BURK Isochorismatase; OS = Hydromonas sp. F02 OX=2268024 GN=dhbB PE=4 SV=1
MSIPRISSYPMPSASNVPQAKLNWRCDAKRAVLLIHDMQSYFVNFFDASKSPIPELLSNIARIKSVCKALGVPVVYSAQPAQQSLLERGILQEWWGNGVTAFPEQVDIVPELSPSEGDVVLTKWRYSAFSKSTLASDMQAQQRDQLIICGVYAHIGCQTTAVEAFMRDMQVFFVADGVADFSFTQHEEALAYVSRCCGIVQSTAQLLSVLQPETETDALPRNLVQLTAQVARLIEIPVADLEAEDNLIFAGLDSIRLMSLVERWKRSGSRLDFVDLAQKTTLNEWWALLQGQSVQQFERNEN

SEQ ID NO: 92616 - protein, 191 aa, unidentified
  source 1..191: note = Unknown
  REGION 1..191: note = tr|A0A3B1BNP1|A0A3B1BNP1_9ZZZZ Isochorismatase; OS = hydrothermal vent metagenome OX=652676; GN = MNBD_GAMMA26-1006 PE=4 SV=1
MSKTALIIVDLQNDYFPGGKWELEGTEAAATKAATLLKNFRAKGLPIVHVRHEFPTTDAPFFVPNSDGAKVHSSVQELEDEPVVLKQQINSFRDTNLKEILDGLDVDSVLICGAMSHMCIDAVTRAAHDFGYNCAIAHDACATLGLEFKGITVPANQVHAAFMAALDFAYANVASTDELLTKMQSAKSPYQ

SEQ ID NO: 92617 - protein, 199 aa, Hyphomicrobium sp.
  REGION 1..199: note = tr|F8JIP1|F8JIP1_HYPSM Putative Isochorismatase hydrolase OS=Hyphomicrobium sp. (strain MC1) OX=717785; GN = HYPMC_0552 PE=4 SV=1
MPVSRTLRDITGMGYTPASVAHSALILIDCQNTYREGVMQLEGVEPALIECQSLLSRYRNAGRPVIHIQHDAGPGTPYDVRDSIGAIADIVAPRDGEPVVVKNYPSSFEKTNLDDLLKGYGVEEVALVGFMTHVCVNSTARAAFNHGYRATVIGHATATRSLPNPSGGAVSAKDLHEASLAALNDIFAVVVPTIDKIAD

SEQ ID NO: 92618 - protein, 200 aa, Hyphomicrobium sulfonivorans
  REGION 1..200: note = tr|A0A109BAD2|A0A109BAD2_HYPSL Isochorismatase; OS = Hyphomicrobium sulfonivorans OX=121290 GN=APY04_2883; PE = 4 SV=1
MTEARPTLRSLLAMPSTPEPLSKSALVLIDCQNTYREGIMQLEGVEPALKECAKLLQRARDAGAPVIHIQHDAGPGSPYDVRDRIGAIADVVAPIEGETVITKSFPSSFEQTNLDAELKKLGVTDLVLAGFMTHVCVNSTARAAFNHGYRPTVVGNATATRALANPLGGTLSADAVHTGALTALTDMFAIVVPSSEAVPD

SEQ ID NO: 92619 - protein, 422 aa, unidentified
  source 1..422: note = Ichthyophthirius multifiliis
  REGION 1..422: note = tr|G0QMD9|G0QMD9_ICHMG Clathrin heavy chain, putative OS=Ichthyophthirius multifiliis (strain G5); OX = 857967 GN=IMG5_047880 PE=4 SV=1
MQISTKYGQLFILTKFGFLQIYELTTNQLIYSNKITESSIFIGQQDSKEDGVYSISRNGSVQLIQIDQNSFLNYLMNNCQQIPNVVQLAFKLAGRYRLPGVDGMFTEQFNKFLMSGDYAKAAQIAASAPGELLRNAQTISKFKTFQGTPSPLLIYFQSLLQKGGLNALESVELCNLVLSQGRKQFVEAWLKENKLECTEQLGDLVSQHDQNSALEIYKRANAGPKVLQTLVALGRQDEANKYAQQSGINVDYMSMIKSCVFTNPVNAVQMAKTMFAQNNGNNIHAVAELFVQAQKFKELSALLVDCMKQNKPEDGPWQTKILEWNIINEPNIVEPIFQLTKWNQYNRLRIAQLCEQKQLFQKALENYSDIKDIKRVCLNTQFIPHPYLVSFFGNLQPDWALTCIYSSQKCIKIQYFALYKNF

SEQ ID NO: 92620 - protein, 195 aa, unidentified
  source 1..195: note = Ideonella sakaiensis
  REGION 1..195: note = tr|A0A0K8NXS5|A0A0K8NXS5_IDESA Isochorismatase; OS = Ideonella sakaiensis (strain NBRC 110686 / TISTR 2288 / 201-F6) OX=1547922 GN=ISF6_5438 PE=4 SV=1
MSADDPLRRLDADRAVLVLVDYQQRLLPALDGGEAALADALALADLARALAVPVLGTEQNPDGLGPNHPALRERCARTLPKQHFDACEDGLGAAIADARPLPPGGGPADVVIAGCEAHVCLLQTALGLRRAGHAVWAVASACASRRAEDRALGLQRLQAAGVGLVAWEMVAFEWLQHARHPRFKAVLPLIKGRPA

SEQ ID NO: 92621 - protein, 185 aa, unidentified
  source 1..185: note = Ignavibacteria bacterium
  REGION 1..185: note = tr|A0A1V5TS02|A0A1V5TS02_9BACT Putative isochorismatase OS=Ignavibacteria bacterium ADurb.Bin266; OX = 1852898 GN=phzD PE=4 SV=1
MKRNSIILKKESTALLIIDLQERILPVIRNYESVLENTVKLIRGFKAMQLPIYFTEQYPKGLGPTSQKILDELSGYTAYQKMTFSCSGAENLFEEFHKKKLTQIVVCGVESHVCVQQTVLDLIANDFQVDLAADAASSRKEIDYTIALDRMRTLGAEITTTESILFELLEVCGTPVFKEVSKIVK

SEQ ID NO: 92622 - protein, 180 aa, unidentified
  source 1..180: note = Unknown
  REGION 1..180: note = tr|A0A484H579|A0A484H579_9ZZZZ Isochorismatase; OS = invertebrate metagenome OX=1711999; GN = RIEGSTA812A_PEG_599 PE=4 SV=1
MQMIANDSCLLIVDVQERLISVVHSPRSVLVGCATLIQAANLIGIPIVVSEQYVRGLGQTVMDLRALAPPDSFREKTAFGCAADASIMARLGGFGRRQVITAGIETHVCVLQSALGLREKGFEVFVVAEACSSRRPESERAALARMGICGVHVVTTEMVLFEWLGSKEHLAFKAVQQLVK

SEQ ID NO: 92623 - protein, 286 aa, Iodobacter fluviatilis
  REGION 1..286: note = tr|A0A377STI2|A0A377STI2_9NEIS Isochorismatase; OS = Iodobacter fluviatilis OX=537 GN=dhbB PE=4 SV=1
MAIPKISTYPMPTEFPANRVSWQPDAKRAVLLIHDMQDYFVDFYDKSAAPIPELIGNTRRILDLAAKLGIPVVYTAQMPDQTLAERGLLQDMWGAGLVAQPARKGIVQELTPQPQDTVLPKWRYSAFQRSNLLESMRSQGRDQLIICGVYAHIGCMMTACDAFMNDIQAFFVGDALADFSAKEHQMALDYVAQRCGYTTSTTALIQQLQGGSLPASLDELRKIIASSLQIPASDLHEDDNLIDWGLDSIRVMSLQESWRRAGVELSFTQLAEQATLAAWWALLAKS

SEQ ID NO: 92624 - protein, 205 aa, Ixodes scapularis
  REGION 1..205: note = tr|B7QGS5|B7QGS5_IXOSC Isochorismatase domain-containing protein 2, putative (Fragment) OS=Ixodes scapularis OX=6945 GN=8041026 PE=4 SV=1
QIMAAAAACNVGRLSSQKTAIFLCDMQDKFRNTIRYFPEIVSVSQRLLKAGKSLDMPVIVTEQYPKGLGRTVPELGLSAYPDLCPVEKTQFSMVTSDVAQRLTDTKADSVVLCGVETHVCVQNTALALLEKGFNVHVVVDACSSRTMVDRFFGFERMKASGAWLTTSESVILGLLGGSAHPKFKELQKLIMEPAPDSGLLGFLKM

SEQ ID NO: 92625 - protein, 74 aa, Janthinobacterium agaricidamnosum
  REGION 1..74: note = tr|W0V4J2|W0V4J2_9BURK Isochorismatase hydrolase; OS = Janthinobacterium agaricidamnosum NBRC 102515 = DSM 9628 OX=1349767 GN=entB PE=4 SV=1
MAIAIAQPGKSLLDKIVLAGLWTSACIVGPALSALKQGFEVYVIADACGDVSDEAHQRAMERMIQAGTQPMSAL

SEQ ID NO: 92626 - protein, 177 aa, Janthinobacterium sp.
  REGION 1..177: note = tr|A0A0S4K5Z8|A0A0S4K5Z8_9BURK Isochorismatase; OS = Janthinobacterium sp. CG23_2 OX=1706231 GN=BN3177_6809; PE = 4 SV=1
MNTLLIIDMQNAWLNNPAQPCFDSAAIVGRINHAARQVRAQGGKVIFVQHSDADAPIGSAPWQVITALEKDPADSTLLKLAGDSFAATDLAAQLAASATSTLYISGFATEFCIDTAVRAAASRGLNVVALSDAHTTADRPHLDAPAIIAHHNWVWSGLPVPAGSSLAVRTTAEAFPA

SEQ ID NO: 92627 - protein, 217 aa, Kibdelosporangium sp.
  REGION 1..217: note = tr|A0A0K3BT03|A0A0K3BT03_9PSEU Isochorismatase of siderophore biosynthesis OS=Kibdelosporangium sp. MJ126-NF4 OX=703222 PE=4 SV=1
MSGIPSIEPYSLPTAADLPPNTAAWVPDPRRVVLLVHDMQRYFLRPFPAELRERLVGNVDELRRTCAALGVPVGFTAQPGSMTAEQRGLLKDFWGPGMRVDDADRAIVEPLEVSDEDWTFTKWRYSAFFQSDLLARMRAHGRDQLLVCGVYAHVGILMTAIEAFTNDIETFVAADAIADFSAEYHEQAVHYAATRCAVVATTSELTSRLDAAREARV

SEQ ID NO: 92628 - protein, 178 aa, Kingella kingae
  REGION 1..178: note = tr|F5S5G6|F5S5G6_9NEIS Isochorismatase family hydrolase OS=Kingella kingae ATCC 23330 OX=887327; GN = HMPREF0476_0449 PE=4 SV=1
MLNQQNTLVLVIDIQERLLPALHQADAFVAACKKFITASTHLSLPIILTEQYPKGLGKTVADITALFPDVTTFEKTQFSAYTAEVQAALAAHSTQNMILLGCETHICVLQTALDLRQNGLNIWIPQECVTSRTDANKQNGLQQMRDAGIVVSNVESLLFQLLRDAKHPQFKTISKLIV

SEQ ID NO: 92629 - protein, 283 aa, unidentified
  source 1..283: note = Klebsiella aerogenes
  REGION 1..283: note = tr|A0A0F1TFJ7|A0A0F1TFJ7_KLEAE Isochorismatase; OS = Klebsiella aerogenes OX=548 GN=entB PE=4 SV=1
MAIPKLQAYALPEASDIPANKVNWAFEPSRAALLIHDMQEYFLNFWGENSAMMEKVVANIAALRDFCKQNGIPVYYTAQPKEQSDEDRALLNDMWGPGLTRSPEQQQVIAALAPDEQDTVLVKWRYSAFHRSPLEEMLKETGRDQLIITGVYAHIGCMTTATDAFMRDIKPFFVADALADFSREEHLMALKYVAGRSGRVVMTEELLPLPASKAALRALILPLLDESDEPLDDENLIDYGLDSVRMMALAARWRKVHGDIDFVMLAKNPTIDAWWALLSREVK

SEQ ID NO: 92630 - protein, 283 aa, unidentified
  source 1..283: note = Klebsiella grimontii
  REGION 1..283: note = tr|A0A285B0T0|A0A285B0T0_9ENTR Isochorismatase; OS = Klebsiella grimontii OX=2058152 GN=entB PE=4 SV=1
MAIPKLQAYALPEASDIPANKVNWAFEPSRAALLIHDMQEYFLNFWGENSPMMERVVANIAALREFCKQNHIPVFYTAQPKEQSDEDRALLNDMWGPGLTRSPEQQQVIAALAPDDSDTVLVKWRYSAFHRSPLEEMLKEAGRDQLIITGVYAHIGCMTTATDAFMRDIKPFFVADALADFSREEHLMALNYVAGRSGRVVMTEELLPLPASKAALRALVLPLLDESDEPMDDENLIDYGLDSVRMMALAARWRKVYGDIDFVVLAKNPTIDAWWALLSREVK

SEQ ID NO: 92631 - protein, 286 aa, Klebsiella oxytoca
  REGION 1..286: note = tr|A0A168QQ80|A0A168QQ80_KLEOX Isochorismatase; OS = Klebsiella oxytoca OX=571 GN=entB PE=4 SV=1
MAIPKLNDYALPTADELPQNKVTWQVEPQRAALLIHDMQQYFLNFWGEDSALIKQVVENIANLRRYCKQQGIPVFYTAQPNQQSDEDRALLNDMWGPGLNKHPEQQAVTAALAPDEDDTVLVKWRYSAFHRSPLQEILQESGRDQLIICGVYAHIGCLTTAIDAFMRNIQPFMVADGLADFSRDEHLMALRYTAGRCGRVVTTASLLPAAGIASIDALRQQILPLLDEDSEDMGNDENLIDYGLDSVRIMELATRWRKIRGDIDFIALARNPTIDSWWALLSEEKA

SEQ ID NO: 92632 - protein, 283 aa, Klebsiella pneumoniae
  REGION 1..283: note = tr|B5XZX8|B5XZX8_KLEP3 Isochorismatase OS=Klebsiella pneumoniae (strain 342) OX=507522 GN=entB PE=4 SV=1
MAIPKLQAYALPEASDIPANKVNWAFEPSRAALLIHDMQEYFLNFWGENSAMMEKVVANIAALRDFCKQNGIPVYYTAQPKEQSDEDRALLNDMWGPGLTRSPEQQQVIAALAPDEDDTVLVKWRYSAFHRSPLEEMLKEAGRDQLIITGVYAHIGCMTTATDAFMRDIKPFFVADALADFSREEHQMALKYVAGRSGRVVMTEELLPLPASKAALRALILPLLDESDEPLDDENLIDYGLDSVRMMALAARWRKVHGDIDFVMLAKNPTIDAWWALLSREVK

SEQ ID NO: 92633 - protein, 283 aa, Klebsiella variicola
  REGION 1..283: note = tr|A0A0B7G9I0|A0A0B7G9I0_KLEVA Isochorismatase; OS = Klebsiella variicola OX=244366 GN=entB PE=4 SV=1
MAIPKLQAYALPEASDIPANKVNWAFEPSRAALLIHDMQEYFLNFWGENSAMMEKVVANIAALRDFCKQNGIPVYYTAQPKEQSDEDRALLNDMWGPGLTRSPEQQQVIAALAPDEQDTVLVKWRYSAFHRSSLEEMLKETGRDQLIITGVYAHIGCMTTATDAFMRDIKPFFVADALADFSREEHLMALKYVAGRSGRVVMTEELLPLPASKAALRALILPLLDESDEPLDDENLIDYGLDSVRMMALAARWRKVHGDIDFVMLAKNPTIDAWWALLSREVK

SEQ ID NO: 92634 - protein, 284 aa, Kluyvera ascorbata
  REGION 1..284: note = tr|A0A378GNH2|A0A378GNH2_9ENTR Isochorismatase; OS = Kluyvera ascorbata OX=51288 GN=entB PE=4 SV=1
MAIPKLQGYALPTALDLPENKVNWAFEPSRAALLIHDMQEYFLNFWGDDSEMMETVVANIAALRDFCKKNGIPVYYTAQPKEQSDEDRALLNDMWGPGLTRSPEQQRVIAALAPDTQDTVLVKWRYSAFHRSPLEQMLKETGRNQLIITGVYAHIGCMTTATDAFMRDIKPFFVADALADFSRDEHLMSLKYVAGRSGRVVMTDELLPSVPTSKEALRALVLPLLDESDEPLDDDNLIDYGLDSVRMMALAARWRKVHGDIDFVMLAKNPSIDAWWALLSREVK

SEQ ID NO: 92635 - protein, 284 aa, Kluyvera cryocrescens
  REGION 1..284: note = tr|A0A2X3DTM7|A0A2X3DTM7_KLUCR Isochorismatase; OS = Kluyvera cryocrescens OX=580 GN=entB PE=4 SV=1
MAIPKLQGYALPTALDLPENKVDWAFEPARAALLIHDMQEYFLNFWGDDSEMMDTVVANIAALRDFCKKNGIPVYYTAQPKEQSDEDRALLNDMWGPGLTRSPEQQRVIAALAPDEADTVLVKWRYSAFHRSPLEQMLKESGRNQLIITGVYAHIGCMTTATDAFMRDIKPFFVADALADFSRDEHLMSLKYVAGRSGRVVMTDELLPSIPASKEALRALVLPLLDESDEPFDDDNLIDYGLDSVRMMALAARWRKAHGDIDFVMLAKNPSIDAWWALLSREVK

SEQ ID NO: 92636 - protein, 180 aa, Kluyvera georgiana
  REGION 1..180: note = tr|A0A1B7JX52|A0A1B7JX52_9ENTR Isochorismatase; OS = Kluyvera georgiana ATCC 51603 OX=1354264 GN=M989_02437; PE = 4 SV=1
MQALLIIDMQGFVPDRIERGMSYFPTRSIDNMRTAIGAFRAAGKPILHVRHQTLEAGSPLHRDSAHFQPVAGFEEQVGEPVFIKTTSSAFSSTDLHGWLQRAQISEIAVIGAVAGYCVNSTVRMGADLGLSITVIRDAVLSFPLESAEISAEDVYRVTLGLLVNGFARGINTAELQLNSN

SEQ ID NO: 92637 - protein, 284 aa, Kluyvera intermedia
  REGION 1..284: note = tr|A0A447MJX6|A0A447MJX6_KLUIN Isochorismatase; OS = Kluyvera intermedia OX=61648 GN=entB PE=4 SV=1
MAIPKLQGYALPTALDLPENKVNWAFEPARAALLIHDMQEYFLNFWGDDSEMMEKVVANIAALRDFCKKNGIPVFYTAQPKEQSDEDRALLNDMWGPGLTRSPEQQQVIAALAPDEDDTVLVKWRYSAFHRSPLEEMLKENGRNQLIITGVYAHIGCMTTATDAFMRDIKPFFVADALADFSRDEHLMSLKYVAGRSGRVVMTDELLPSVPVSKEALRALVLPLLDESDEPFDDDNLIDYGLDSVRMMALAARWRKVHGDIDFVMLAKNPSIDAWWALLSREVK

SEQ ID NO: 92638 - protein, 191 aa, Kocuria rosea
  REGION 1..191: note = tr|A0A378GY51|A0A378GY51_KOCRO Probable isochorismatase OS=Kocuria rosea OX=1275 GN=phzD PE=4 SV=1
MPQHPAQGRTALLVIDMQNSYFDFPELEEQREPVTEKVNELIRAARDGGCPIVLIRTQHERDGSTWTVNMHDDGQGFAFPGTEQSEYVAGLDTEGGTGLVKTRDSAFFDTDLAARLRNLGATHLMLCGISTHSCVAQTAIDAFAHDFRAAVARDAVASENSELSRALLAFLEDEMRQDILHQDEAVARLRS

SEQ ID NO: 92639 - protein, 283 aa, unidentified
  source 1..283: note = Kosakonia radicincitans
  REGION 1..283: note = tr|A0A5E8BFC4|A0A5E8BFC4_9ENTR Isochorismatase ); OS = Kosakonia radicincitans OX=283686 GN=UYSO10_2134 PE=4; SV = 1
MAIPKLEGYALPAAADIPQNKVSWPFEPERAALLIHDMQDYFVSFWGDNCPMMQQVIANIAALRAFCKQHHIPVYYTAQPKAQSDEDRALLNDMWGPGLTRSPEQQKIVAELAPDEADTVLVKWRYSAFHRSPLEQMLKETGRNQLLITGVYSHIGCMTTATDAFMRDIKPFMVADALADFSREEHLMSLKYVAGRSGRVVLTQELLPVPGSKAALRAVVLPLLDESDEPLDDDNLIDYGLDSVRMMALAARWRKVHGDIDFVMLAKNPTIDAWWALLSREVK

SEQ ID NO: 92640 - protein, 186 aa, unidentified
  source 1..186: note = Kuenenia stuttgartiensis
  REGION 1..186: note = tr|Q1PZS5|Q1PZS5_KUEST Strongly similar to isochorismatase (2,3 dihydro-2,3-dihydroxybenzoate synthase) OS=Kuenenia stuttgartiensis OX=174633 GN=entB; PE = 4 SV=1
MEQEKILVKTKNLNSANTALLICDMLNDFVKKGASLEVPAARDIIPGIKKEILSARKSGIPVIYCCDAHIKNDPEFSLWPEHAVEGTEGACIVKELAPGKDDFLVTKKRYSCFYKTSLQKVLKQFGATHLIITGVVTNICVLYTVCDAYMRGYAVTIPQNCVAALTKKDHVYALQQMKRIFNAKIR

SEQ ID NO: 92641 - protein, 298 aa, unidentified
  source 1..298: note = Kushneria phyllosphaerae
  REGION 1..298: note = tr|A0A2R8CJL9|A0A2R8CJL9_9GAMM Isochorismatase; OS = Kushneria phyllosphaerae OX=2100822 GN=dhbB PE=4 SV=1
MAIPAIASYSLPTTSELPDNRVNWQVDPARAVLLIHDMQRYFLAKYDVSAAPVPEVIHHLATLIKAARAAGVPVVYTAQPTDQPDSDRALLNDFWGPGLPAHPEQYPVVDELAPQNGDVVLTKWRYSAFQRSDLRERMRTWGRDQLIIGGVYAHIGCMATALEGFMQDVQCFMLTDGVADFSRERHDMALEYVAGRCGVVTTSARALEALESGQGSQQAEVAMTQAALTERVATLAGVSAEEIPADDNLLFYGLDSMRMMTFVEELRREGFDVSFMDLVEAPTIVDWVALLNRQGVSA

SEQ ID NO: 92642 - protein, 288 aa, Labrenzia aggregata
  REGION 1..288: note = tr|A0A0M6YAC7|A0A0M6YAC7_9RHOB Isochorismatase; OS = Labrenzia aggregata OX=187304 GN=entB PE=4 SV=1
MTIPTISDYPMPKDFPANKTGWKPDAARAVFLIHDMQDYFLRYYNADGELMTQLIANLQRVRNWAYANNVPVIYTAQPHDQPPEDRALLNDMWGPGLTVADPALQQVVKGLEPGENDVVLTKWRYSAFQRSDLKARMASLGRDQLIVGGIYAHIGCLMTVADAFMNDIQAFMIGDAVADFSEAEHKMALKYVATRCGAVTDTASLTGAARKSEPMRDWLHSRVLELIEDDADLDPEENLIFYGLDSIQVMKLASELKERGIVVGFDELARVPTLNGWWALIESKRLAA

SEQ ID NO: 92643 - protein, 216 aa, Labrenzia alexandrii
  REGION 1..216: note = tr|A0A5E8GWU0|A0A5E8GWU0_LABAD Amidase OS=Labrenzia alexandrii (strain DSM 17067 / NCIMB 14079 / DFL-11); OX = 244592 GN=SADFL11_1747 PE=4 SV=1
MSKHEMISPENAALVLIDFQPAMYQGVESHDRLSVMHNVQILAKGAKLFNVPTVISTVAKDSFSGPFMPEVTDLFPEVEVVDRTSINSWVDENFRKAVAATGRKKIVLAGLWTEACVMFPTLDLLREGYEVYIPADACGDITPEAHERAMNRLMQAGAVPMNALQFIFELQQDWARGETYDGVMDILKTHTPYGIQVRFSKWALGEHASEAGIAAE

SEQ ID NO: 92644 - protein, 171 aa, Lactobacillus brevis
  REGION 1..171: note = tr|A0A0C1MDG7|A0A0C1MDG7_LACBR Isochorismatase; OS = Lactobacillus brevis OX=1580 GN=LbDm2_0286 PE=4 SV=1
MAQALIVIDMQQALAKIDRRNQVVATINQRIDRYREAQRPIIFIQHTEPGMEVASAGWQLFPDLHAAGSDVYYNKTRPDSFYQTGLEAFLKMNQLRTIEICGAQVEYCVDTTIRVAYHLGFQIELLMAGISTLDSDLLTATQIKQHHAHIWEHRFAEFVTADTDLDGEYQK

SEQ ID NO: 92645 - protein, 205 aa, Lactobacillus buchneri
  REGION 1..205: note = tr|J9W2T8|J9W2T8_LACBU Isochorismatase; OS = Lactobacillus buchneri CD034 OX=1071400; GN = LBUCD034_0237 PE=4 SV=1
MTSFDKRGADDRLLSPDNAVLTIIDYQPVQIGSIGSMRHADLLKNAEMVVEAAKLFKLPIVLSTVNAHNQRNSDTVKPLKDLVGDIPSYDRSSINAWEDKDYNDAIKATGRKKIIILALWTEACLTFPTIDAIAEGFDVYPVVDAVGGTSTIAHETALRRVEQAGAHLITIPQLVCELQRDWNRQDTVPGFVKLLQENGAFTNLQ

SEQ ID NO: 92646 - protein, 167 aa, Lactobacillus casei
  REGION 1..167: note = tr|K6QDI3|K6QDI3_LACCA Isochorismatase; OS = Lactobacillus casei 21/1 OX=1051651 GN=LCA211_2497 PE=4; SV = 1
MLKDGLVVIDVQYGLSAAHHYKQLLANINQRIDAYHAADHPIIFMQHTDESMPYNGHDWQLDTQLHRAPSDRVILKYHSDSFFQTGLAATLHGLHVQTIEVAGLQTEYCIDTAIRVGHDLGFKAATIHGLNSTFDTPDLSAQQIIAHHEGIWDGSFAEVVRDEGVKL

SEQ ID NO: 92647 - protein, 168 aa, unidentified
  source 1..168: note = Lactobacillus curieae
  REGION 1..168: note = tr|A0A401FHT6|A0A401FHT6_9LACO Isochorismatase; OS = Lactobacillus curieae OX=1138822 GN=NBRC111893_70 PE=4; SV = 1
MIIFREDKRALIVIDLQNGVGPLVNNADLIKRVNKRINYYHSHNKPIIFIRHSDQGLEKNSYDWQLVDDLETNSQDYYVDKTHADSFHNTNLQTVLDELKVNELEICGAEIPYCIDATIKAAFDRGYKLFMSRGTVSSENDESIPFPILVEHYEKIWNHRFVEFIDEE

SEQ ID NO: 92648 - protein, 184 aa, Lactobacillus delbrueckii
  REGION 1..184: note = tr|F0HWV9|F0HWV9_LACDL Isochorismatase; OS = Lactobacillus delbrueckii subsp. lactis DSM 20072; OX = 888027 GN=pncA PE=4 SV=1
MENEALLIIDYTNDFVDDKGALTCGAPAQALAGQIVSLADQFLAAGKWVILPTDKHFKGNPYHPETKLFPPHNLPNTWGREFYGPLQTWYNKHQDDKHVLVLDKSRYSAFCATGLDLFLRERKVSRVHLAGVCTDICVLHTAMDAYNHGYDITVHEKAVAALNDAGQEWALNHFKSCLGAEVVD

SEQ ID NO: 92649 - protein, 183 aa, unidentified
  source 1..183: note = Lactobacillus hominis
  REGION 1..183: note = tr|I7LAN5|I7LAN5_9LACO Isochorismatase transposase; OS = Lactobacillus hominis DSM 23910 = CRBIP 24.179; OX = 1423758 GN=BN55_04625 PE=4 SV=1
MTQEALLIIDYTNDFVSDKGSLTCGKPAQEIENEIVNLADSFLKQNKWVIIPTDLHFPGNKYHPETKLFPPHNLPNTWGRQLYGKLQPWYDKNKTNDHVIFMDKTRYSAFAGTNLDLILRERKIDTLHLTGVCTDICVLHTAMDAYNRCYNLVIHQDGVASFDENGHKWALNHFKSCLGATIL

SEQ ID NO: 92650 - protein, 167 aa, Lactobacillus paracasei
  REGION 1..167: note = tr|S2N9U6|S2N9U6_LACPA Isochorismatase; OS = Lactobacillus paracasei subsp. paracasei Lpp225; OX = 1256225 GN=Lpp225_1688 PE=4 SV=1
MLKDGLVVIDVQYGLSAAHHYKQLLANINQRIDAYHAADHPIIFMQHTDESMPYNGHDWQLDTQLHRAPSDRVILKYHSDSFFQTGLAATLHGLHVQTIEVAGLQTEYCIDTAIRVGHDLGFKAATIHGLNSTFDTPDLSAQQIIAHHEGIWDGSFAEVVRDESVKL

SEQ ID NO: 92651 - protein, 165 aa, Lactobacillus rhamnosus
  REGION 1..165: note = tr|K8QFP5|K8QFP5_LACRH Isochorismatase; OS = Lactobacillus rhamnosus LRHMDP2 OX=1203258; GN = LRHMDP2_1221 PE=4 SV=1
MLRDTLIVIDVQNGLNTAANYDQLVTAINHRIDAYHAAGRPILFIQLTDDELPYGSAAWQLEARLHRLENDQVMLKYHSDSFYHTGLETTLHGLGASTIEIAGLQTEYCIDTAIRVSHDLGFKPTIIHGLNSTFNSPILSASQIIAHHESIWNGTFAEVLQTPED

SEQ ID NO: 92652 - protein, 193 aa, Lactococcus lactis
  REGION 1..193: note = tr|A2RLE6|A2RLE6_LACLM Putative isochorismatase; OS = Lactococcus lactis subsp. cremoris (strain MG1363); OX = 416870 GN=llmg_1538 PE=4 SV=1
MEENLKDFLITKREAMQNSALIIIDLQAFIKKLAKKAEPYGWDKIIENNRALIAAFDQANQPVYLVTVEPKILWKSAKEAFSRMILQDELDNNSRSHKLVKFGPSAFKQSDDDLADELKKLSVSKIYVTGVSMSNGVVKTAKDGAESAFESFIIEDACADRKLKNYQKTLTEIPEFGKVIKTKEIIEELNKNV

SEQ ID NO: 92653 - protein, 179 aa, Lactococcus piscium
  REGION 1..179: note = tr|A0A1C3SY39|A0A1C3SY39_9LACT Putative isochorismatase OS=Lactococcus piscium OX=1364; GN = LP2241_50532 PE=4 SV=1
MKQGLLVIDVQNDYFAGGKMALAGADEVLLKINALEERFLAEKLPIIYIQHIKYASGADFFEVGTVGADLHPQLKHDASSITVEKQFPNSFQGTDLQHQLEQNGVEQLVICGMMTHMCIRATTPVAESLGYTPFVISDATATRDLTVNGELMPAKQVQETMLAELSAVASLMTTNEFLA

SEQ ID NO: 92654 - protein, 284 aa, Leclercia adecarboxylata
  REGION 1..284: note = tr|A0A4V6JI18|A0A4V6JI18_9ENTR Isochorismatase; OS = Leclercia adecarboxylata OX=83655 GN=entB PE=4 SV=1
MAIPKLTGYALPGAADLPSNKVSWTMEPARAALLIHDMQEYFLNFWGDNCPMMAQVVANIARLRDYCKQQGIPVYYTAQPKEQSDEDRALLNDMWGPGLTRSPEQQRIVAELTPDEADTVLVKWRYSAFHRSPLEQMLKDSGRDQLIITGVYAHIGCMTTATDAFMRDIQPFFVADALADFTRDEHLMSLKYVAGRSGRVVTTDELLPSVPASKAALREAILPLLDESDEPMDDENLIDYGLDSVRMMGLAARWRKVHGDIDFVMLAKNPTLDAWWALLSREVK

SEQ ID NO: 92655 - protein, 201 aa, Leifsonia rubra
  REGION 1..201: note = tr|S7W3K6|S7W3K6_9MICO Isochorismatase OS=Leifsonia rubra CMS 76R OX=1348338 GN=ADILRU_1401 PE=4 SV=1
MTTALIVVDVQLGFDDADYWGERNNPDCDSNIGMLIGYWRRQGWPIVYVRHDSADAASPLHPSSPGNQFKDVLSGTPDLLVSKTVNSSFHGSPDLDAWLTASRINSIAICGITTNHCCETTARVGGNLGYDVTFVVDATHTFDRVGPFGEEITADELSTITGVNLHGEFARVVVTHDLLGAAPDGFDAEPSAPSRSVRFQR

SEQ ID NO: 92656 - protein, 190 aa, Leminorella grimontii
  REGION 1..190: note = tr|A0A085HKL9|A0A085HKL9_9GAMM Isochorismatase; OS = Leminorella grimontii ATCC 33999 = DSM 5078 OX=1005999; GN = GLGR_1690 PE=4 SV=1
MSSALIVIDLIEEIIGERGRSNGSAGQTKDRNVVAKTNLAVAAARAKSIPIVWVKVGFADDYSDIPPYSPMFNAAKQNGALRLSDPGCDWVEGLDVQPQDEVVVKKAVSAFAGNALLSWLTDRGYDHVLLAGVSSAMAIQNTARQAHDLGFRVTVLEDLCAAATADLHQQSMDMLRPMAEITTSDVFFKS

SEQ ID NO: 92657 - protein, 227 aa, Leptolyngbya sp.
  REGION 1..227: note = tr|A0A0P4UUJ6|A0A0P4UUJ6_9CYAN Isochorismatase; OS = Leptolyngbya sp. NIES-2104 OX=1552121 GN=NIES2104_36770; PE = 4 SV=1
MFVKADPYPYPFNGDLRPENTALIIIDMQTDFCGKGGYVDKMGYDLSLTRAPIEPIRQVMNVMRSLNFHIIHTREGHRPDLSDLPENKRWRSQQIGAGIGDLGPCGRILVRGEPGWEIIPELAPLPGEVIIDKPGKGSFYATDLDLILNRKGIQNLILTGITTDVCVHTTMRDANDRGYECLLLSDCTGATDYGNYLAALNMIKMQGGVFGSVSDSIELITALKSGL

SEQ ID NO: 92658 - protein, 175 aa, Listeria monocytogenes
  REGION 1..175: note = tr|A0A3Q0NC11|A0A3Q0NC11_LISMG Isochorismatase; OS = Listeria monocytogenes serotype 1/2a (strain EGD / Mackaness) OX=1334565 GN=LMON_0630 PE=4 SV=1
MILLVIDTQKLIMTNNLYNFDSLVPNIEQLIATARKNKIEIVYIRHDDGPNTELTEGKEGFDIYKKFQPTTHERIFDKTVNSAFKGTGLVEYLKEKGTKKIVVAGLQTDFCIDATVKCGFEHGFHMIVPAHANSTEDNHFMSGENSYKYYNEWMWPGRYATCISMEETIKEMEHN

SEQ ID NO: 92659 - protein, 241 aa, unidentified
  source 1..241: note = Luminiphilus syltensis
  REGION 1..241: note = tr|B8KRB9|B8KRB9_9GAMM Isochorismatase hydrolase; OS = Luminiphilus syltensis NOR5-1B OX=565045 GN=NOR51B_1347; PE = 4 SV=1
MRISTHFSRWILSALLVLGTGQVIASTATPTPAGGLLTPENHALILIDHQPQMAFATHSIDIVELRNNVTGLAKAAKAFSVPTILTTVAEESFAGPLFPELKAVFPEQSPIDRTTMNTWEDPRIAERVNEIDRKKIVVAALWTEVCGVGPVLSAIDQGYDVYFVTDASGGVSKEAHDMAVQRMVLAGAQPITWLQYMLELQRDWSRTDTYEAVTGIAKQHGGGYGLGIIYAKEMFGAKEGN

SEQ ID NO: 92660 - protein, 298 aa, Luteococcus japonicus
  REGION 1..298: note = tr|A0A1R4KG66|A0A1R4KG66_9ACTN Isochorismatase of siderophore biosynthesis OS=Luteococcus japonicus LSP_Lj1; OX = 1255658 GN=FM114_14120 PE=4 SV=1
MGLPSLIDYTLPTASELPDPVVNWALDPTRCALLVHDLQAHFLRPYAPALREELVGNAASVLQACRQHGIPVAHTHQPDDQSPEERGLLTDFWGPGPSSTGRAAPTGDDPLAAVDGEAVIVRRRYNAFLGTELDQWLRENGRDQLIVCGIYAHIGCLMTSAHAFMTERQPFMVADATADFSAQEHRMALEYVACRLGRSLTTHDVLQALPHGADQDGADQDGHSLDSLRGRVAELVELPVEQVRPDDDLASLGLDSMRRMKLVEDLAQTGTHLDFMAVALAETCTDLHALATPDQAAA

SEQ ID NO: 92661 - protein, 199 aa, unidentified
  source 1..199: note = Lutibaculum baratangense
  REGION 1..199: note = tr|V4RHD6|V4RHD6_9RHIZ Isochorismatase; OS = Lutibaculum baratangense AMV1 OX=631454 GN=N177_2092; PE = 4 SV=1
MTTPKTLLELAGATPAPAALSESAVVVIDAQREYEEGPIALPAVHAAIAEISALVARARRQGRPVLHVVHRGKAGGLFDPEAGGRIIEALKPHDGERVIEKTLPNAFAGTELHEAVKALGVQKLVVCGFMTHMCVSSTVRAALDLGLSSTVVANATATRDLPSQVGGENIGWEALQLASLAALADRFATVVAAEGEVPN

SEQ ID NO: 92662 - protein, 185 aa, Lysinibacillus sphaericus
  REGION 1..185: note = tr|A0A2X0XTA3|A0A2X0XTA3_LYSSH Isochorismatase; OS = Lysinibacillus sphaericus OX=1421 GN=NCTC7582_03652; PE = 4 SV=1
MKQALVVIDAQQELIEGNQDEQAVYRKDELLKTINAVIQKAIEAEAYIIFVRDQDVAGGEGEGFQVHQAIQVPTTAVYFDKLATNAFYRTGLLDYLQANEVEHLVMMGCKTEHCVDTAVRAATIQGFDVTLVGDGHSTNGSDYLSPEDTVAHHNDILHGHYNVDHFSLVRNADEALFEPTHNSYR

SEQ ID NO: 92663 - protein, 292 aa, Lysobacter antibioticus
  REGION 1..292: note = tr|A0A0S2FB00|A0A0S2FB00_9GAMM Isochorismatase; OS = Lysobacter antibioticus OX=84531 GN=dhbB PE=4 SV=1
MTIPTIASYPMPGAARLPANRVDWRPDPSRAVLLIHDMQDYFLAFYDRAQAPVPELLANIRALRDACDDAGVPVVYTAQPTEQSAAQRGLLQPWWGPGITAKPELAPVALEIAPRPQDVVLTKWRYSAFVSSDLRERMREQGRDQLIVCGIYAHIGCMMTLADAFMHDIQPFMVADAVADFSAEEHAMALDYVSRRCGVVIDRAACIEALGTGLGLPRSLIALRTELAQIMEVPLDDIAASDNPFEAGLDSIRLMTLLERWSSRGERIGLVELAERGSVSEWWQLIDSRRAA

SEQ ID NO: 92664 - protein, 187 aa, Lysobacter capsici
  REGION 1..187: note = tr|A0A108U918|A0A108U918_9GAMM Isochorismatase; OS = Lysobacter capsici AZ78 OX=1444315 GN=AZ78_2334 PE=4; SV = 1
MIDPQRTALIPIDVQRGFDYPPWGPRNNPRMEANGQRLLQLWRAKGLPLIHVRHDSIIDASTLHPSHPGNAFRPGFEPLAGEAVVGKSVNAAFIGTDLDLRLRRRGIDTLVLFGISTDMCVSTTARVASNLGYRTLVIADACFCFDLVDADGSVIAADAVSRAHLATLRAEFAEVMNVDEIVAMIGV

SEQ ID NO: 92665 - protein, 185 aa, Lysobacter enzymogenes
  REGION 1..185: note = tr|A0A0S2DB35|A0A0S2DB35_LYSEN Cysteine hydrolase; OS = Lysobacter enzymogenes OX=69 GN=FE772_02730 PE=4 SV=1
MTNVAPPQIALLIVDMFNFLDFADGQALLKQALPAARRIAALKRRFRRVGAPVIYANDNFGQWHADFRELVAVCRHESCRGAPIADLLAPEADDFYVLKPKQSAFHSTPLAVLLEHCGCREVAITGISTDVCIAATAIDAHMRDLTVRIPADCVAAPSRRRTAVALAVLKQSVHARCAQSPSLHP

SEQ ID NO: 92666 - protein, 224 aa, Lysobacter sp.
  REGION 1..224: note = tr|A0A0D0S7K4|A0A0D0S7K4_9GAMM NODE_22, whole genome shotgun sequence OS=Lysobacter sp. A03 OX=1199154; GN = TI01_1577 PE=4 SV=1
MAVMETSDLTARQYWAQVKANRNRAKFGFGSRPAIVNIDVQRAYTDMDAFKTAYETDPRQIEHINTLSALVRERGLPVIWTYVAYLENGEDAGVWGTRTNTPDSLQNIKHGSERAQIDPRADVQPGDIVMHKRMASPFFETNLWSLLTFHRIDTLIITGGSTSGCVRACSVDSLSRGFRTIVVEECVADKHEIPHFANLADIMLKYADVEAVDEVAAQLKKIAP

SEQ ID NO: 92667 - protein, 222 aa, unidentified
  source 1..222: note = Magnetospira sp.
  REGION 1..222: note = tr|W6KBU1|W6KBU1_MAGSQ Putative Isochorismatase; OS = Magnetospira sp. (strain QH-2) OX=1288970 GN=MGMAQ_2604; PE = 4 SV=1
MPVIANALPFAFEFDPATTALVVIDMQRDFLEPGGFGEALGNDVSQLAPVVPATEKLLAACRAAGLEIVHTRESHLPDLSDCPPAKRNRGSCKLRIGDPGPMGRILVRGEPGNDIVPSLAPLPGETIIDKPGKGAFYKTGLTHRLADDGITHLIFAGVTTEVCVQTSMREANDRGFDCLLVADCTGSYFPEFKQATLEMVRAQGGIVGWTADLYAVLEALDG

SEQ ID NO: 92668 - protein, 176 aa, Marinobacter excellens
  REGION 1..176: note = tr|A0A137SBN1|A0A137SBN1_9ALTE Isochorismatase; OS = Marinobacter excellens LAMA 842 OX=1306954 GN=J122_2126; PE = 4 SV=1
MLMKAEQSTLLLVDVQERLMPAISQGEEVVDRCTLLATIAGVLEVPVVGTEQLPEKLGPNVESVRELCNVTVGKHHFDACPDGLIDQLPEGRQQIVIGGCETHVCMLQTALSLLDAGYKVWVVADATGSRNDFDRDVALDRLHQSGARIVTTEMVAFEWMVHCRHPRFRDIQALIK

SEQ ID NO: 92669 - protein, 178 aa, Marinobacterium sp.
  REGION 1..178: note = tr|A0A081FUW6|A0A081FUW6_9GAMM Isochorismatase; OS = Marinobacterium sp. AK27 OX=1232683 GN=ADIMK_3461 PE=4; SV = 1
MTPSSNTTSRRALIVIDLQNDYFHDGHYPLWNSETTLDHVTYAIRNAQAVGDTVILVQHVAKGPSPLFNPGTSGVQIHPTVLKQVPNATIITKSHADSFIDTDLQQQLSERGINELLICGMMTQNCITHTALSPLAGHYHVSVVGDCCTSVDEIIHKVALRALSDRISVVDLKEVFQG

SEQ ID NO: 92670 - protein, 301 aa, Marinomonas mediterranea
  REGION 1..301: note = tr|F2JZ73|F2JZ73_MARM1 Isochorismatase; OS = Marinomonas mediterranea (strain ATCC 700492 / JCM 21426 / NBRC 103028 / MMB-1) OX=717774 GN=Marme_2828 PE=4; SV = 1
MAIPSIATYPMPTVNDFPKGKVDWQLDPKRAVFLIHDMQDYFLRFYDQGSDLIQTLKQNLVDIKAFCHQQGIPVVYTAQPNDQAPEDRALLNDMWGSGLNDYPELQPVISELTPSEIDTVLVKWRYSAFHRSNLQELMQGWGRDQLIIGGIYAHIGCMISAADAFMRDIQPFMVGDALADFSEDEHKMALSYTAGRTGRVVSTEDVLLSAKHSEGATSEEPSMTFDLLKAQVLELIDEDDLSEFESDDELIDYGLDSIQIMSFVTKWRTLGVEVTFAELVQAASLNGWWALIERKQQKVAN

SEQ ID NO: 92671 - protein, 299 aa, Marinomonas posidonica
  REGION 1..299: note = tr|F6CU82|F6CU82_MARPP Isochorismatase; OS = Marinomonas posidonica (strain CECT 7376 / NCIMB 14433 / IVIA-Po-181) OX=491952 GN=Mar181_2163 PE=4 SV=1
MSIPTIPSYPMPTADHFPQQKVTWALEPNRAVFLIHDMQAYFLRFYDADSELIKTLKQNLSAIKAYCHAHGIPVVYTAQPKDQKPEDRALLNDMWGSGLNDFPELQQVVDELTPGEQDTVLVKWRYSAFHRSNLQELMSNWGRDQLLIGGIYAHIGCMMTAVDAFMRDIQPFMIGDALADFSESEHYQALTYTAGRAGRVISTNEVLLATSVSTSGLHYEQFKTQILSLLDEEDLDDFQADDELIDYGLDSIQIMNLVSQWKEMGVEISFQELASAATLNAWWDLLQTKMTTKQVDLVE

SEQ ID NO: 92672 - protein, 299 aa, Marinomonas sp.
  REGION 1..299: note = tr|A6VVT1|A6VVT1_MARMS Isochorismatase; OS = Marinomonas sp. (strain MWYL1) OX=400668 GN=Mmwyl1_1633; PE = 4 SV=1
MTIKKISDYPMPNSADYPANKVDWEIDPKRAVLLIHDMQRYFVNFYDTQGPLITSLIQNLVRLREWAYANNVPVVYTAQPYEQPDADRALLNAMWGPGLPASTKDQQLIIDQLTPNEHDVVLTKWRYSAFARSDLRERLQEWGRDQLIVGGVYAHIGCMITCVDAFMGDVQPFLVGNAVADFSEDEHFLALKYVSSRCGKVIDVESLSQSSTKALTQEWLYARVQQLIEEDEELDPDENLIVYGLDSLKIMQFASDLKAYNIAISFEEIARNPTLSNWWALIQERQINVSDTNETPEPA

SEQ ID NO: 92673 - protein, 205 aa, Massilia sp.
  REGION 1..205: note = tr|A0A085FXL9|A0A085FXL9_9BURK Isochorismatase; OS = Massilia sp. LC238 OX=1502852 GN=pncA2 PE=4 SV=1
MSAIVLGKGDALLIVDLQNDFLPGGALAVPRGDLVIAPINALIDLYHERGLPIYASRDWHPEDHCSFTAQGGPWPPHCVAATEGALFSEVLQLPEEAIVISKALTAAEDAYSAFNGTGLARSMLADGITRLAVCGLATDYCVLNTVLDGVEAGFEVLLALEATRAVEVKPGDGDRAIARMLAKGAVPVRLSAGQLVADVALGARL

SEQ ID NO: 92674 - protein, 94 aa, Melissococcus plutonius
  REGION 1..94: note = tr|F3YAH5|F3YAH5_MELPT Isochorismatase; OS = Melissococcus plutonius (strain ATCC 35311 / CIP 104052 / LMG 20360 / NCIMB 702443) OX=940190 GN=MPTP_1047 PE=4; SV = 1
MNAKRALIVIDLQIGLGYELYNFKHVLEKVNQRIAFYRKMNQPIIFIQHSDKSLLRGSTDWNFFPELNYYKDDWLIEKHHANAFYHTSLSNIAF

SEQ ID NO: 92675 - protein, 233 aa, unidentified
  source 1..233: note = Mesorhizobium delmotii
  REGION 1..233: note = tr|A0A2P9ADX8|A0A2P9ADX8_9RHIZ Putative isochorismatase family protein OS=Mesorhizobium delmotii; OX = 1631247 GN=BQ8482_111264 PE=4 SV=1
MNARAEVTQRYIDADPYPWPYNGELRPDNTALIIIDMQTDFCGPGGYVDHMGYDLSLVRAPIEPIRSVLSAMRAKGYTIIHTREGHRPDLADLPANKRWRSRRINAGIGDPGPCGRILVRGEPGWDIIPDLYPAEGEPIIDKPGKGSFCATDLELILNQRGIENIVLTGITTDVCVHTTMREANDRGFECVMLEDCCGATDYGNHLAAIKMIKMQGGVFGAVSNSASFVAQLP

SEQ ID NO: 92676 - protein, 231 aa, Mesorhizobium metallidurans
  REGION 1..231: note = tr|M5FA23|M5FA23_9RHIZ Putative isochorismatase family protein OS=Mesorhizobium metallidurans STM 2683; OX = 1297569 GN=MESS2_790053 PE=4 SV=1
MNARAGQRYIEADPYPWPYNGDLRSDNTALIIIDMQTDFCGPGGYVDHMGYDLSLVRAPIEPIKSVLSAMRAKGYTIIHTREGHRPDLADLPANKRWRSRRINAGIGDPGPCGRILVRGEPGWDIISDLYPAEGEPIIDKPGKGSFCATDLELILNQRGIENIVLTGITTDVCVHTTMREANDRGFECVMLEDCCGATDYGNHLAAIKMIKMQGGVFGAVSNSVALVAQLP

SEQ ID NO: 92677 - protein, 252 aa, Mesorhizobium plurifarium
  REGION 1..252: note = tr|A0A0K2W6N1|A0A0K2W6N1_MESPL Putative isochorismatase family protein OS=Mesorhizobium plurifarium OX=69974 GN=MPL1032_80022 PE=4 SV=1
MTAHHAPPLESLERPEFFAMNARAEITERYIDADPYPWPYNGDLRPDNTALIIIDMQTDFCGPGGYVDHMGYDLSLVRAPIEPIKAVLSAMRAKGYTIIHTREGHRPDLADLPANKRWRSRRINAGIGDPGPCGRILVRGEPGWDIIPDLYPAEGEPIIDKPGKGSFCATDLELILNQRGIENIVLTGITTDVCVHTTMREANDRGFECVMLEDCCGATDYGNHLAAIKMIKMQGGVFGAVSNSAALVAQLP

SEQ ID NO: 92678 - protein, 233 aa, unidentified
  source 1..233: note = Mesorhizobium prunaredense
  REGION 1..233: note = tr|A0A1R3VF03|A0A1R3VF03_9RHIZ Putative isochorismatase family protein OS=Mesorhizobium prunaredense OX=1631249 GN=BQ8794_50618 PE=4 SV=1
MNARAEVTQRYIDADPYPWPYNGELRPDNTALIIIDMQTDFCGPGGYVDHMGYDLSLVRAPIEPIRSVLSAMRAKGYTIIHTREGHRPDLADLPANKRWRSRRINAGIGDPGPCGRILVRGEPGWDIIPDLYPAEGEPIIDKPGKGSFCATDLELILNQRGIENIVLTGITTDVCVHTTMREANDRGFECVMLEDCCGATDYGNHLAAIKMIKMQGGVFGAVSNSVSFVAQLP

SEQ ID NO: 92679 - protein, 233 aa, Mesorhizobium sp.
  REGION 1..233: note = tr|A0A090E336|A0A090E336_9RHIZ Putative isochorismatase family protein OS=Mesorhizobium sp. ORS 3324 OX=408180 GN=MPLB_390046 PE=4 SV=1
MNARAEITERYIDADPYPWPYNGNLRPDNTALIIIDMQTDFCGPGGYVDHMGYDLSLVRAPIEPIKSVLAAMRVKGYTIIHTREGHRPDLADLPANKRWRSRRINAGIGDPGPCGRILVRGEPGWDIIPDLYPAAGEPIIDKPGKGSFCATDLELILNQRGIENIVLTGITTDVCVHTTMREANDRGFECVMLEDCCGATDYGNHLAAIKMIKMQGGVFGAVSNSAALVSQLP

SEQ ID NO: 92680 - protein, 179 aa, Methanocella arvoryzae
  REGION 1..179: note = tr|Q0W799|Q0W799_METAR Isochorismatase; OS = Methanocella arvoryzae (strain DSM 22066 / NBRC 105507 / MRE50) OX=351160 GN=entB PE=4 SV=1
MRTALLLIDIQNDYFPGGKSELTGAVEASMNARRLLDAFRLNKQPVIHVQHMSTRPGASFFIPGTAGSEIHDNVKPAAGEITIVKHYPNSFRETTLLDKLKQLEIEQLVVCGMMTHMCVDSTVRAAYDYGFKCILASDACATKDLQFKDQIVDAIDVHNAFVSALSGMFAVVKCTDELL

SEQ ID NO: 92681 - protein, 180 aa, Methanosarcina barkeri
  REGION 1..180: note = tr|A0A0E3SJ33|A0A0E3SJ33_METBA Isochorismatase; OS = Methanosarcina barkeri 3 OX=1434107 GN=MSBR3_0973 PE=4; SV = 1
MKEALLLIDIQNDYFPGGKMELVSMEEAAKKAAKLLKAFRTASKPVFFIKHMSTKSDATFFVPGTRGTDIHSSVSPLSDETVIEKHFPNSFLQTELLLVLKESEVTDLIICGAMSHMCIDTTVRAAKELGFKCTLIADACATRNLKFGEEILPAQTVHASFMAALDGMFATIMTAEEYLN

SEQ ID NO: 92682 - protein, 180 aa, Methanosarcina horonobensis
  REGION 1..180: note = tr|A0A0E3SHH7|A0A0E3SHH7_9EURY Isochorismatase; OS = Methanosarcina horonobensis HB-1 = JCM 15518 OX=1434110; GN = MSHOH_3469 PE=4 SV=1
MKEALLLIDIQNDYFPAGRMELAGMEDAAKKVSALLELFRNAGKPIFFIRHLSTKSGAAFFIPGTSGADIHVSVQPLQGETVIEKHFPNSFFQTELLSRLKEADVTYLVVCGAMSHMCIDTTVRAAKELGFTSTLIADACATRDLKLKDEILPAYVVHSVFMAALDGMFANVMTTNEYIS

SEQ ID NO: 92683 - protein, 180 aa, Methanosarcina mazei
  REGION 1..180: note = tr|Q8PVQ5|Q8PVQ5_METMA Isochorismatase; OS = Methanosarcina mazei (strain ATCC BAA-159 / DSM 3647 / Goe1 / Go1 / JCM 11833 / OCM 88) OX=192952 GN=MM_1907 PE=4; SV = 1
MKETLLLIDIQNDYFPGGRMELAGMEDASKKAAGLLKAFRASGKPVFFIKHLSTRPGASFFIPGTPGAEIHDSVQPLSEETVIEKHFPNSFFQTELLSRLNEENVTDLVICGAMSHMCIDTTVRAAKELGFTSTLIADACATRDLKFKDELLPASTVHASFMAALDGMFAKVMTTEEYLV

SEQ ID NO: 92684 - protein, 168 aa, Methanosarcina sp.
  REGION 1..168: note = tr|A0A0E3NZ28|A0A0E3NZ28_9EURY Isochorismatase; OS = Methanosarcina sp. MTP4 OX=1434100 GN=MSMTP_1659 PE=4; SV = 1
MIENTKKATEKARVKGIPVIYIVMGLRLKVLPDMGLWKDIKKINFKEISPGGSGPGRSLAEELTIVEELTPHPKDFVVTKYNTMDAFHNTDLELILKGLKCDTLILTGDATNLCFETTVRSAFNRGYKCIVLSDCTATINEEFQKFAIEVIFPMLGEVIMVEELEIIP

SEQ ID NO: 92685 - protein, 188 aa, unidentified
  source 1..188: note = Unknown
  REGION 1..188: note = tr|A0A1D3RLX4|A0A1D3RLX4_9BACT Isochorismatase; OS = methanotrophic endosymbiont of Bathymodiolus azoricus (Menez Gwen) OX=343232 GN=BAZMOX_00299_2 PE=4 SV=1
MTTHPNLLDSQNSLLLIVDIQDKLTGAMPEGNAEDMLENSSRLITAANLLNVPIIITEQYPKGLGATVASIREKLNASTTHFEKTGFSCLAADNFSATLEKKARKQIIIVGQETHVCILQTALELMQQGYQVHIVEDAVCSRKAENKFYALQRLQTQGATISNFESVLFEWLKNSQHEHFPAIAALLR

SEQ ID NO: 92686 - protein, 199 aa, unidentified
  source 1..199: note = Methyloceanibacter caenitepidi
  REGION 1..199: note = tr|A0A0A8JZS3|A0A0A8JZS3_9RHIZ Isochorismatase; OS = Methyloceanibacter caenitepidi OX=1384459 GN=GL4_0379; PE = 4 SV=1
MSNPTLRDLTGMSPDPAPISTSALVLIDCQQTYREGVMQLEGVEPALEEAAELLRRFREAGRPVIHIMHDAGEGTPYDVGAPIGQIADVVAPIDGETVIIKRFPSAFEQTELDWELKKHGVDNVVYGGFMTHMCVSSTARSAFNKGYANTVVAGATATRALPNPAGGEAVPAEQLQTASLSALADMFAVVVPATKNLPD

SEQ ID NO: 92687 - protein, 223 aa, unidentified
  source 1..223: note = Methyloglobulus morosus
  REGION 1..223: note = tr|V5C4X5|V5C4X5_9GAMM Isochorismatase; OS = Methyloglobulus morosus KoM1 OX=1116472; GN = MGMO_89c00140 PE=4 SV=1
MSTIEINAEPEAIAIEIAKTAVVMIDMQRDFLEPGGFGESLGNDVSLLSAAIEPCKALLDAARQHEMLVIHTREGHLPDLSDAHKAKVERGDPSLRIGQLGPMGRILIRGEPGQDIIPELYPQLGEPVIDKPGKGAFYATDLQSILETNGIENLIVCGVTTEVCVHTTVREANDRGYRCIVPGDCCGSYIPEFHEVGLRMIKAQSGIFGWVTDSHTILTAMNI

SEQ ID NO: 92688 - protein, 184 aa, unidentified
  source 1..184: note = Methyloligella halotolerans
  REGION 1..184: note = tr|A0A1E2RXC9|A0A1E2RXC9_9RHIZ Putative isochorismatase OS=Methyloligella halotolerans OX=1177755; GN = A7A08_02178 PE=4 SV=1
MLMDKERSQLLIVDMQERLLPAMSDADDVTKACERLVRGAQALDLPITVSEQYPKGLGPTAEPLRQTLGNSATVMEKVEFSCFRNAAIRHRLEELRRKGRPQVVVAGIEAHICVLQTALDLAAQGFETFVAADAIGSRLDESRRLAMGRMLHADVSVVNAEMVLFEWVGKAGSPEFKEIQALVK

SEQ ID NO: 92689 - protein, 199 aa, unidentified
  source 1..199: note = Methylophaga frappieri
  REGION 1..199: note = tr|I1YH20|I1YH20_METFJ Isochorismatase; OS = Methylophaga frappieri (strain ATCC BAA-2434 / DSM 25690 / JAM7) OX=754477 GN=Q7C_1054 PE=4 SV=1
MTQSTTLREIVGLGHKPANLADAALIMIDCQNTYRQGVMQLTDVEPALVQAQKLLARARDMQVPIIHIQHDAGPGSPYDLETDLGQIADEVAPQPGEIVITKHFPNAFIQTELDERLKTLGIDQIVLAGFMTHMCINSTAHGGFNLGYQVTVVASATATRDLPDASGQIVPAEQVQHAALASTRDLYAAVINSIADLPA

SEQ ID NO: 92690 - protein, 183 aa, unidentified
  source 1..183: note = Methylophaga nitratireducenticrescens
  REGION 1..183: note = tr|I1XH47|I1XH47_METNJ Isochorismatase; OS = Methylophaga nitratireducenticrescens OX=754476; GN = Q7A_874 PE=4 SV=1
MMANSENSVLVIIDVQQKLAQAMPQGVHERLNKQINILLTAAKVLSIPVIVTEQYPKGLGPTEADLQNNLPVGTKTIEKTCFSCLQSEDFRFQLAATHRQQVILVGMETHICVLQTALALKAENYNVHVAEDGVCSRSKSNQYNAIQRMRHAGVIISNVESILFEWLGDASHAEFKTLAKLIV

SEQ ID NO: 92691 - protein, 188 aa, Methylophaga thiooxydans
  REGION 1..188: note = tr|A0A0A0BHR7|A0A0A0BHR7_9GAMM Isochorismatase; OS = Methylophaga thiooxydans OX=392484 GN=LP43_0811 PE=4; SV = 1
MHTNMSVADSQTSTLMVIDIQERLTSSMPAGVRDRVIEQVSVLLTAAESLAIPVLVTEQYPKGLGPTEKALLNKLPNNTPVIEKTSFSLVKAESVIESLQQSGRKQVFLVGMETHICVLQTALDLLKQGYEVFVVEDAVSSRAKGNQFNALQRLRLAGAVITNVESLLFEWLGDAKHPAFKQLAKLIV

SEQ ID NO: 92692 - protein, 203 aa, unidentified
  source 1..203: note = Methylorubrum extorquens
  REGION 1..203: note = tr|C5AXZ9|C5AXZ9_METEA Putative Isochorismatase hydrolase OS=Methylorubrum extorquens (strain ATCC 14718 / DSM 1338 / JCM 2805 / NCIMB 9133 / AM1) OX=272630 GN=MexAM 1_META1p1183 PE=4 SV=1
MARKDGLKFGDLGPRAAHLCVDAQRMFSEETDWHTPWLARILPNIERIAAAHPERTVFTRFVPLRSPEEGRGAWRRYYEHWPKMTLEALGPEMVDLVPSVTRFVPPAKVVDKLVYSPWLKPELAGLLEAEAIDTLVVTGGETDVCVLATILGAVDRGYRVIVACDAVCSSADQTYDAMMFLYQSRFGEQIETASTDEILGAWS

SEQ ID NO: 92693 - protein, 189 aa, Microbacterium hydrocarbonoxydans
  REGION 1..189: note = tr|A0A077AY47|A0A077AY47_9MICO Isochorismatase (Fragment) OS=Microbacterium hydrocarbonoxydans OX=273678; PE = 4 SV=1
MTRALIVIDMQRGFDDLAFWGPTANPECEANVAALIERWGREGEPIVIVRHDSPKEGSPLHPSAPGNALVSAVAAVEPDVLVSKSVNSAFYGDPDLQAWLEERGIRDLVICGIQTNMCVETTARMAGNLGYDVTVALDATRTFDLTGEVAGVGTVSRTAAELMAETALVLQQGGFARIVRTADLLKLAL

SEQ ID NO: 92694 - protein, 190 aa, Microbacterium oleivorans
  REGION 1..190: note = tr|A0A031FVA8|A0A031FVA8_9MICO Isochorismatase; OS = Microbacterium oleivorans OX=273677 GN=BW34_01169 PE=4; SV = 1
MQIPPRQLTLDRAALVVIDVQRGFDDSAYWGERDNPDCEANVAALIKRWRERGWPVVFVRHDSTSPASPLRPGQAGNDLKPEATGIPDLLVTKSVNSSFHGTPDLDAWLRANGIEQIVVTGVSTNHCCETTARVGGNLGYDVYFALDATHSFDRTAPDGTVIPAATLAAITATNLDGEFATVVSTADLIR

SEQ ID NO: 92695 - protein, 303 aa, Microlunatus phosphovorus
  REGION 1..303: note = tr|F5XI91|F5XI91_MICPN Isochorismatase; OS = Microlunatus phosphovorus (strain ATCC 700054 / DSM 10555 / JCM 9379 / NBRC 101784 / NCIMB 13414 / VKM Ac-1990 / NM-1) OX=1 032480 GN=dhbB PE=4 SV=1
MPLPRTPIPSTISYQTPPLPATSRGPWTLDRDRVALLVHDMQGYFLRAYEPACPALLQARTQLAELLRVARVARVPIVYTAQPGDQPASTRGLLTPIWGPGIGGSDEDAAVVADLAPEPDDRVLVKHRYSAFVGTDLGDWLTDVGRDQLLVTGVYAHIGVLATATDALMRDVEPFVAGDAVVDFSPADHERALVQLASVGAAVIDSATALAALAPPATATADDSWQDWLAGRLGTLLGSESLGQQLVAQPELDLFEAGLDSLRCFELIDDLAAVGVDVDFSVLASEGTSAYLLSQLEQARPAA

SEQ ID NO: 92696 - protein, 38 aa, Micromonospora sp.
  REGION 1..38: note = tr|A0A385ARD4|A0A385ARD4_9ACTN Isochorismatase; OS = Micromonospora sp. B006 OX=2201999 GN=MicB006_2220 PE=4; SV = 1
MHKAYGDSFEDTNLYWSFQTAPGRTAGTVEAADVDFAA

SEQ ID NO: 92697 - protein, 180 aa, unidentified
  source 1..180: note = Unknown
  REGION 1..180: note = tr|A0A1J5R1M6|A0A1J5R1M6_9ZZZZ Putative isochorismatase OS=mine drainage metagenome OX=410659; GN = phzD_4 PE=4 SV=1
MLLTAAQSGLLIVDVQEKLAPVMSEPRRVLQNCGLLLRAAARLGVPALVSEQYPRGIGPTVVDLRQWIGPEAIAEKIHFSCADEPALLERLGAWNRPQLVVAGIEAHICVLQTALGLAARGFRPFVVADACASRQPSSEALAMDRLRQAGVAVVSTEMVLFEWLNRAGTPEFKELSPLIR

SEQ ID NO: 92698 - protein, 190 aa, Moellerella wisconsensis
  REGION 1..190: note = tr|A0A0N0IA06|A0A0N0IA06_9GAMM Isochorismatase; OS = Moellerella wisconsensis ATCC 35017 OX=1354267; GN = M992_1662 PE=4 SV=1
MSQVLIIIDLIEDIIGEQGLSNSSAAETKTRDIINKSNKTAQYARAHQIPVIWVKVGFSDDYHDIPAGSPMFKNAQKLGALKLSGSGCQWVKGLDVQPQDHIFIKKGVSAFTSNKLDQWLKQHNCQHLVIGGVSSLMAIQSTARLAHDLGYQVTVLEDLCAAANEELHRQSMQALQGMATISCSTEWQQS

SEQ ID NO: 92699 - protein, 252 aa, unidentified
  source 1..252: note = Monoraphidium neglectum
  REGION 1..252: note = tr|A0A0D2M6N8|A0A0D2M6N8_9CHLO Isochorismatase hydrolase OS=Monoraphidium neglectum OX=145388; GN = MNEG_8904 PE=4 SV=1
MPANMMPRSALALALLLSAVLSGLGAASAQATGILSKPAQQVKENRISAKNAVLLLLDHQTGLFQLVRDSSVTDFKTNVLALAATAKLYGVPTILTTSLEGGPNGPILPEIRAIFPNATLIPRPGEINAWDNTDFVKAATGRKKLLIAGIVTDVCVLFPTLSALAEGYEVYIVTDASGTFSAPVRDAALARATGAGAVLINWFAVACELQRDWRLGPNSGLGLAKLLSVYLPEYGNLISSHSAAVAVGKTSG

SEQ ID NO: 92700 - protein, 188 aa, Moraxella catarrhalis
  REGION 1..188: note = tr|D5VB16|D5VB16_MORCB Isochorismatase hydrolase; OS = Moraxella catarrhalis (strain BBH18) OX=1236608; GN = MCR_0598 PE=4 SV=1
MIAKNTALLLIDLQQGFYDEAYWGGHRNNPHCEQVCFELLSHWREQDLPIFHIRHSSTTPQSRLHPTHQGFNWIELTKPLPCEHVITKHVNSGFIGTDLQQQLTKAGIDTLVLVGLTTNHCVSTTARMAANLGFTTFVVSDGTATFDRMGATGERFDSQLVHEISLANLHGEFATVLTSAELLHKYTL

SEQ ID NO: 92701 - protein, 187 aa, Moritella sp.
  REGION 1..187: note = tr|A0A137SAV0|A0A137SAV0_9GAMM Isochorismatase; OS = Moritella sp. JT01 OX=756698 GN=AKG98_1157 PE=4 SV=1
MSNTALLLIDFQNDYYSTYADAKWALSGTETAASNAATLLAAFRKQSLPVIHVRHEFPSNDAPFFLPESEGAKIHTSVAPIKGEPVILKHQINSFRDTELNNILKELNVEKLIIVGAMSHMCIDAVTRAAVDFGYECHVAHDACATLDLEFNGVTVPAIHVHSAFMAALNFGYCNVDSTDKLLDLVR

SEQ ID NO: 92702 - protein, 221 aa, Mycetocola reblochoni
  REGION 1..221: note = tr|A0A1R4IC42|A0A1R4IC42_9MICO Isochorismatase of siderophore biosynthesis OS=Mycetocola reblochoni REB411; OX = 1255698 GN=FM119_00930 PE=4 SV=1
MPLPRISPYELPPVDTTQNRTSWRIEPDRAVLLVHDMQRHFVDAFVDAPEAQISTAITAIRALLRRCRAQGIPVVYTAQPPGQDQADRGLLTDLWGPGLATPESARIVDELEPAASDDVLTKWRYSAFHRSDLAHRMRNRRRDQLIVTGVYAHIGCLTTALDAFMQNIEVFFAADAQADFSLEEHEMAIRYVAGRCGQVTTAAGLLDDLDPQPAQAAGAAL

SEQ ID NO: 92703 - protein, 205 aa, Mycobacterium sp.
  REGION 1..205: note = tr|A0A0A1FSM2|A0A0A1FSM2_9MYCO Isochorismatase; OS = Mycobacterium sp. VKM Ac-1817D OX=1273687 GN=G155_10845; PE = 4 SV=1
MKPNLTDLVAPGHTAIVTQECQGAVIGPDAGLAALADEARREALPNITKLLPAARAASVKVVHCLVQRRPDGLGSNHNAKIFTIGRNDVGILPGSPGATLLPELGPEPDDLVLSRWHGLGPMGGTDLDAILRNLGVRTIVAVGVSVNIAITNLVMDAVNAGYRVVLPRDAVAGIPSAYADAVIDNTLSLLATVTTTDRLLHAWQR

SEQ ID NO: 92704 - protein, 72 aa, Mycobacterium ulcerans
  REGION 1..72: note = tr|X8F9D2|X8F9D2_MYCUL Isochorismatase family protein OS=Mycobacterium ulcerans str. Harvey OX=1299332; GN = I551_4902 PE=4 SV=1
MGYDLSLVRVPLGPAQTVLETARKLGLLIVHTREASPEVSRDGRSSRRWRRCQEKWSWTNLAREASTPPIWS

SEQ ID NO: 92705 - protein, 211 aa, unidentified
  source 1..211: note = Mycobacteroides abscessus
  REGION 1..211: note = tr|A0A0U1B2H7|A0A0U1B2H7_9MYCO Probable isochorismatase (Phenazine biosynthesis) PhzD; OS = Mycobacteroides abscessus OX=36809 GN=phzD_2 PE=4 SV=1
MTTATRGIPMIAEYDLPTVDLLPSNTATWRIDPDRAVLLIHDMQRYFLEPLPVSLRQALVRNVAAIRDRSVAAGIPIAYTAQPGSMTQEQRGLLKDFWGPGMRVDEEHRQIVDPIAPDAGDWVFTKWRYSAFHRSALLERMHAAGRDQLVICGVYAHVGVLMTAVDAFTHDIETFLVADAIADFDDESHWMALEYAARRCAVLTVTGEVLT

SEQ ID NO: 92706 - protein, 242 aa, unidentified
  source 1..242: note = Mycobacteroides franklinii
  REGION 1..242: note = tr|A0A4R8R4Y7|A0A4R8R4Y7_9MYCO Isochorismatase family protein OS=Mycobacteroides franklinii OX=948102; GN = phzD_1 PE=4 SV=1
MRRRTFLRSSSVALPAAALALAVPGSAHADVRPTGSITYPFSAIHVPATSAPWTLEPDRAVLLVHDMQHYFIKAYAPQSDPIATVLENIKSLLDTAHAHQVPVYYSAQPGGMTKEQRGLFGQLYGPGMPDDDAERAIVDPLGPTAADTVLTKWKYSEFFRSDLLEILRNTDRDQLIIVGVYAFSGITATSTDAVQNDIQAFIVSDAVADYTSTGHDQALAWCAERTARILTTQSALSALNNS

SEQ ID NO: 92707 - protein, 242 aa, unidentified
  source 1..242: note = Mycobacteroides salmoniphilum
  REGION 1..242: note = tr|A0A4R8RVS9|A0A4R8RVS9_9MYCO Putative isochorismatase OS=Mycobacteroides salmoniphilum OX=404941; GN = phzD_2 PE=4 SV=1
MRRRTFLRTGSVALPVAALGLTAAGSATADVRPTGSITYPFSAIDVPAKGAPWSLETDRAVLLVHDMQHYFVKAYTPQADPIATVLRNIKSLLDTAHAHGVPVLYSAQPGGMTPEQRGLFGQLYGPGMPDDDAERAIVDPIAPLATDTVLTKWKYSEFFRSELLEILSNANRDQLIIVGVYAFSGITVTSTDAVQNDIQAFIVSDAVADYTSTGHGQALTWCAERTARILNTRSALAALDNS

SEQ ID NO: 92708 - protein, 198 aa, unidentified
  source 1..198: note = Mycolicibacterium fortuitum
  REGION 1..198: note = tr|A0A0N9Y4W9|A0A0N9Y4W9_MYCFO Cysteine hydrolase; OS = Mycolicibacterium fortuitum OX=1766 GN=A5751_11825 PE=4; SV = 1
MTRPTLRELASLPAAPARLADSTLVLIDCQNTYTQGIMELEGVQAALEQTAELLDRARSAGIPIIHIQHSDGPGSLYDIEGESGAIVASVAPREGEPVVVKQFPNSFVQTDLDHRLKGHNASNLVLAGFMTHMCVNSTARGAFNLGYAPTVVAAATATRTLAGPDGAPVPAADMQSASLAAMSDLFAVVVPDVAGIPD

SEQ ID NO: 92709 - protein, 211 aa, unidentified
  source 1..211: note = Mycolicibacterium phlei
  REGION 1..211: note = tr|A0A448GZV6|A0A448GZV6_MYCPH Isochorismatase (Phenazine biosynthesis) PhzD OS=Mycolicibacterium phlei; OX = 1771 GN=phzD_1 PE=4 SV=1
MTTATRGIPIIAEYDLPTVDLLPANTATWQIDPARAVLLIHDMQRYFLAPLPVSLRDQLVSNVAAIRDRSVAAGIPIAYTAQPGSMTQEQRGLLKDFWGPGMRVDEEHRQIVDPIAPDAGDWVFTKWRYSAFHRSALLERMHAAGRDQLVICGVYAHVGVLMTAVDAFTHDIETFLVADAIADFDDESHWMALEYAARRCAVLTVTDEVLT

SEQ ID NO: 92710 - protein, 252 aa, unidentified
  source 1..252: note = Mycolicibacterium smegmatis
  REGION 1..252: note = tr|I7FGE6|I7FGE6_MYCS2 Isochorismatase hydrolase; OS = Mycolicibacterium smegmatis (strain ATCC 700084 / mc(2)155) OX=246196 GN=MSMEI_4027 PE=4 SV=1
MLDIIRLPRCQREDLHVPRKPWSGVIPDEDLASFSREFDNEDRPLSAGTKPALLIIDMTRAFVDSTYPTGWSPTGAPAVQANAELLSAARRAHLPIFFTRGYPGPDDPATPSERGRWKRAANPRPLPPGTPPGDVIAEPLTPHAGEVVIDKGAKPSGFFGTALSSYLIYEGCDTVIVTGMTTSGCVRATVLDAFQYNFHVVVPHECCADRSQISHKVSLFDMHMKYGDVIDLSETIAYIESLSSQQHALSAS

SEQ ID NO: 92711 - protein, 299 aa, Myxococcus xanthus
  REGION 1..299: note = tr|Q1D692|Q1D692_MYXXD Isochorismatase OS=Myxococcus xanthus (strain DK 1622) OX=246197 GN=MXAN_3644 PE=4 SV=1
MALPAIAPYPMPGTTDLPKNKVSWTPDPSRAVLLIHDMQRYFVEAFTQGQSPVTELVANIQRLRQHCTALGIPVVYSAQPGGQTPEQRGLLLDFWGGGINGGPDQKRIIDALTPAEGDIQLTKWRYSAFRKTDLMDQMKKLGRDQILISGIYAHIGCLQTASDAFMSDVRPFLIADALGDFSLAHHQLALSYAAQLCAVTTTTQQVLDALGPVSTSSTLTREQVRAEVAELLQESPEALGDDDNLLERGMDSIRLMTLVEKWRAAGAETTFVELAERPTLADWFTLLSLGNTPASRNAA

SEQ ID NO: 92712 - protein, 187 aa, unidentified
  source 1..187: note = Nanobsidianus stetteri
  REGION 1..187: note = tr|R1G3E4|R1G3E4_NANST Amidase related to nicotinamidase OS=Nanobsidianus stetteri OX=1294122; GN = Nst1_373 PE=4 SV=1
MEWYNKDEMKKLINKKNSVLVVWDVQEALVNSIFNKDEFLTKLKELINSARQYNIPIVYTKITPLPERFQPPYLKRRFNPGDIVKEVYPKESDIILNKNTTSIFVGTNFELMLRNAGINVIVFTGIATDIGVETSARHAQALGFLPVIAREAVSSSDKQAHERSLANMSKLMLVLDNKEIIERWSSE

SEQ ID NO: 92713 - protein, 224 aa, Neisseria bacilliformis
  REGION 1..224: note = tr|F2B9U5|F2B9U5_9NEIS Isochorismatase OS=Neisseria bacilliformis ATCC BAA-1200 OX=888742 GN=pncA PE=4 SV=1
MPPCLQARKAGRVIVSIDVDAQKTFTPLCPAELPVVGGDTIAAELNAQAALADLRVMTKDAHSQKAAWLVDNSVDMLKPTGLKNADLTWVAHAMIGSEGYGLLDGLPDLDGYDYCVWKGVDPALHPYGACYHDIEERLSTGLIEWLAAKQARFVLVGGLATDYCVKHTVLQLCRGGNWQVIVNRAACRGIAPETVAKAWQEMEAAGALLLSDAAEIEKYFKSNG

SEQ ID NO: 92714 - protein, 217 aa, Neisseria macacae
  REGION 1..217: note = tr|F9F0Q0|F9F0Q0_9NEIS Isochorismatase OS=Neisseria macacae ATCC 33926 OX=997348 GN=pncA PE=4 SV=1
MTIVAIDIQPQFRFTCMAANATHFLLRPENMVNELNRQAALADKRVLIENVSIDPESICATVVNRNGVMFGRPSGFFSQCAGGCRGTHLLQGLPSPADYDHALELSGKHVHGACFHEANEANSTGLLEWLHEQKADTVIIGGLAIEETVANTAKQLSWYSDNLHIIVNLGACHGYAPESTIETIYQMRKMGITVASNAEAIPELMRRFSGINQVKVS

SEQ ID NO: 92715 - protein, 211 aa, Neisseria meningitidis
  REGION 1..211: note = tr|A0A125WG25|A0A125WG25_NEIME Isochorismatase transposase OS=Neisseria meningitidis NM2795 OX=1069620; GN = entB PE=4 SV=1
MIVSIDVDAQKTFTPLCPKELPVNEGHLIVEELNAQAALADLRVMTKDAHHAAAKWLVDNPVDMLKPTGLPDADLTWVAHAMVGTRGYELLDGLPCAKEYDYCVWKGVDPELHPYGACFHDIEEKLSTGLIEWLRCQNTDMVIVGGLATDYCVKTTVLQLLKGSNWQVIVNEAACRGIAPDTIETAWQEMRSAGVIILKNAEEIKKYINNQ

SEQ ID NO: 92716 - protein, 205 aa, Neisseria shayeganii
  REGION 1..205: note = tr|G4CF72|G4CF72_9NEIS Isochorismatase OS=Neisseria shayeganii 871 OX=1032488 GN=pncA PE=4 SV=1
MWVVEQPEQMGQKLGYPNVDQTWVRHAEVGTPGFLPLPGLPEPEEYDFLVHQGLDINMHPYGCCFHDTAETLSTGLLEWLQVRQADCLIVGGLATDYSVKETVLQLCRYGNWQVLVNLAACRGMGEDTVAAALQKMREVGAILLDDANAVADWLKQHHCPSSLRHLSDAHRFVPHLPCAKYAPNHPEKCTHRINGCIDGLGCESE

SEQ ID NO: 92717 - protein, 212 aa, Neisseria wadsworthii
  REGION 1..212: note = tr|G4CM73|G4CM73_9NEIS Isochorismatase OS=Neisseria wadsworthii 9715 OX=1030841 GN=HMPREF9370_0182 PE=4 SV=1
MIVSIDVDAQKTFTPLCPQELPVAEGDKIVDELNAQAALADLRVMTKDAHSPAARWLVDNSVDMLKPTGLKNADLTWVAHAMVGTEGFELLDGLPDLNGYDYCVWKGVDPQLHPYGACFHDIEERLSTGLIEWLTLQNTNTVIVGGLATDYCVKTTVLQLLKGRKWRVIVNAAACRGIAPETVEAAWQEMKAQGAVVLENAESIEKYLKSIA

SEQ ID NO: 92718 - protein, 185 aa, unidentified
  source 1..185: note = Neosartorya fumigata
  REGION 1..185: note = tr|Q4X1N3|Q4X1N3_ASPFU Isochorismatase family protein OS=Neosartorya fumigata (strain ATCC MYA-4609 / Af293 / CBS 101355 / FGSC A1100) OX=330879 GN=AFUA_2G09355; PE = 4SV=1
MTKSALLVLDIQNGIVERLDDPDTYLASLAPVIKAARKSVVKVIYVKTAFREGYPDTHPRSTMGTRVRESQSFHEGDISVEIPSIVSPDANEPIITKRRVSAFTATDLDLVLRCLGAEHLVVVGLITSGAVLSTVRQAADLDYQLTVLEDLCMDRDQEVHDVLMKKVLSRQARVVSSAEWLAELD

SEQ ID NO: 92719 - protein, 181 aa, Nitrincola lacisaponensis
  REGION 1..181: note = tr|A0A063Y3B1|A0A063Y3B1_9GAMM Isochorismatase; OS = Nitrincola lacisaponensis OX=267850 GN=ADINL_2390 PE=4; SV = 1
MLIDRKLSRLLVVDLQEKLMPAIHDGEKLLQNCRWMTQVASTLDVPILVSEQYPKGLGPTVEPIRSLLRDDAFMEKTYFSCLSDDGCRTTLLDKHYPQVVIIGTEAHVCVMQTALEMKEAGIHVFVVEDCIGSRDPHNKHLAIERMRQAGITLVAREMVAFEWLRRANTHVFRYVNRTFIA

SEQ ID NO: 92720 - protein, 203 aa, Nocardia africana
  REGION 1..203: note = tr|A0A378X6N6|A0A378X6N6_9NOCA Probable isochorismatase OS=Nocardia africana OX=134964 GN=phzD; PE = 4 SV=1
MTEFPSPSVSKAPRRVCLDAERAGLMVIDVQNGFVNSSSALVVPPIVDLVERWTTNNRPVLMSRYRNYSGSPYERLLGWRELHRAPDIDIIDALVGFLDHPMTTVIDKTGYTALTVEAVEHWHGAGVTDLILCGIATDGCVFKTALDVFEAGFTPWVVVDAVASNTTRHRAQEIHESALLLLARLIGADQLILAADIISALIR

SEQ ID NO: 92721 - protein, 84 aa, Nocardia brasiliensis
  REGION 1..84: note = tr|A0A379BUT5|A0A379BUT5_9NOCA Isochorismatase; OS = Nocardia brasiliensis OX=37326 GN=dhbB_4 PE=4 SV=1
MTEPVTIGREDVIADIAAALGVAPHEVPEDGDLTDAGLDSVRLMSLVEKWRASGATEADFATLAAEPVLGVWLDVLVPGHADRT

SEQ ID NO: 92722 - protein, 196 aa, Nocardia cerradoensis
  REGION 1..196: note = tr|A0A231GUH2|A0A231GUH2_9NOCA Vibriobactin-specific isochorismatase OS=Nocardia cerradoensis OX=85688 GN=vibB; PE = 4 SV=1
MTIQMDKAALLVVDAQNGFVNQHSKHVIPAIVDLASRWMVTGRPTVFTRYWNYEGSPYENLIGWRALYGPPDTDIVADLIPFTTKAGAHLLDKTTYTALTKEGLALLAELDVTDLVICGIATDACVLKTALDAFELGFTPWVLRDAVASNATRHRAAEIHASALLHISRLVGAGQIIDSAELLPLLSVVGPAARES

SEQ ID NO: 92723 - protein, 217 aa, Nocardia cyriacigeorgica
  REGION 1..217: note = tr|A0A2L2JSC4|A0A2L2JSC4_9NOCA 2,3-dihydro-2,3-dihydroxybenzoate synthetase OS=Nocardia cyriacigeorgica OX=135487 GN=dhbB PE=4 SV=1
MPIPPIAPYDLPTADEVAPNEVAWTVTPERSALLIHDMQQYFLSAYDVARDPARTLLVNIARLRDRCHELGIPVIYTMQPGNQHPSRRGILADFWGTGMSHGPDTEVVPELRPHASDIQVTKWRYSAFQRTDLRELLGYYNRDQLMITGVYTHMGCMLSAAEAFMSDVRPFLALDATADFSRDEHLMALNYTARRCGAVLSTADLLEQLSEVPARAG

SEQ ID NO: 92724 - protein, 79 aa, Nocardia otitidiscaviarum
  REGION 1..79: note = tr|A0A379JIG2|A0A379JIG2_9NOCA Isochorismatase; OS = Nocardia otitidiscaviarum OX=1823 GN=dhbB_2 PE=4 SV=1
MTNENTIVAERARVIADVAAALGVEPAELTDETNLLDAGLDSVRIMSLVETWRSAGFEHIDFPTLASDPVLGSWIEALG

SEQ ID NO: 92725 - protein, 1330 aa, Nocardia seriolae
  REGION 1..1330: note = tr|A0A1I9ZIZ6|A0A1I9ZIZ6_9NOCA Isochorismatase; OS = Nocardia seriolae OX=37332 GN=entB PE=4 SV=1
MESPQGPSASIARDEVRTAIATHLGLDPSAIGDHDDLIQLGLDSIRTMKLAGAWRKRGLPVNFAQLAAEPTLAAWHRILGGAEMDVPAGTGLAGAMNHMAVQDDSRDLGSAAAESTAAAVTPVADGGDPVVDDGSPFALAPMQHAYWVGRAEGQELGAVAAHLYVEFDGAGVDPERLGAAVEGLVRRHPMLRTRFLPDGTQQTLERPGREVWSVTDLRGAGADAAERVLEELRDRRTHQLMAVAEGQVVDIALTLLPQGRTRLHLDVDMLAADAMSYRILVADLARLYHGEQLPVQDYTFRQYLAEHAGPAQEHAADREWWQGRLANLPGAPELPRAPEAAVNSGAAARSGAPVHSEAAAYSEAAAHSGPPVHSGRGPGEAGGERVARTVRLHHWLSPEAKGRMFAAAHARGITPAMALASVFAETIGGWSAQRRFLLNLPLFHREPVHPRVDGVVGDFTSSVLLEVDVTEPVTVTERARALQRELHAAGAHSGYTGLEVLRDLGRLRAEPVLAPIVYTSAINLGELFADQVTATFGDPVWIISQGPQVLLDAQVTEVRGGLLLNWDIRADAFPANMVETMFTRYIDAILRLAGGDGSAADEPGTLRDDAARDIGAPVANPDAGHGLTAAVSSGADCAPDPSGPDRVAVGPRPKSVVSARAEAGGAEVRAAGWDAEAAVRIPVEQAVVRARVNATDGAVSGRALHSGLFEFAATNPGAPAVIWESDRTDGVVTASPAEEVAQQSASSTRVLSYAELAGQALAVAGALRAAGVGPGDAVAVQLPKGPDQIVATAGVLAAGGVYVPIGFDQPAARRAEILRTGAVVAAVTAGARVPEVPTLVLSEARVYPEPLAEAVVPDPEAIAYVLFTSGSTGKPKGVEVPHRAAMNTIDDLNERFGIGAADRALALSALEFDLSVYDIFGLLSAGSAVVALDEGQRGEPGRWVEMIRRLGISVVNCVPSLLDMLLEAAAGKPVDSLRMVILGGDWVDVALPGRLAAVAPGCRFAGLGGATETAIHSTIREVVNAEVPEEWSAVPYGTPLRNVRCRVVGPSGQDCPDWVTGELWIGGAGVAAGYRGDAERTADRFVTHKGLRWYRTGDLARYLPDGCLEFLGRADHQVKIRGYRVELGEVESALRTLPGVRHAIAAVIGSAAPKLTAVVVADAGAALEVPALLDAAADLLPAYMIPGRVELLAELPFTSNGKPDRKAIASLLAAGEGDGEFVAPRTDVERAVADIVATVLGRERVGVTDDFFALGGDSVLATAVIARVRDWLDSPDTVVADFFAARTVEGLSRRLVERERRAGVAGRLEEVARLYLEVAALSDEEILALS

SEQ ID NO: 92726 - protein, 221 aa, Nocardiopsis alba
  REGION 1..221: note = tr|J7L9R5|J7L9R5_NOCAA Isochorismatase; OS = Nocardiopsis alba (strain ATCC BAA-2165 / BE74); OX = 1205910 GN=dhbB PE=4 SV=1
MSLPTIAPYPLPTSEELPENRAHWPLEPERALLLVHDMQRYFVRPYAEGSQPIVGAVANIAALRSACRAAGVPVVYTAKPGDMTSEQRGLERDFWGAGMKAVAEHTDIVPELAPDGEDLLLTKWRYSAFAQTDLAERMAAQGRDQIVVTGVYAHIGCQLTAADAFMRDIRPFLIADALADFSADHHRSALNYAAGRCATVLSTRDALGFLDRGADSTGARP

SEQ ID NO: 92727 - protein, 207 aa, Nocardiopsis dassonvillei
  REGION 1..207: note = tr|D7B8A3|D7B8A3_NOCDD Isochorismatase; OS = Nocardiopsis dassonvillei (strain ATCC 23218 / DSM 43111 / CIP 107115 / JCM 7437 / KCTC 9190 / NBRC 14626 / NCTC 10488 / NR RL B-5397 / IMRU 509) OX=446468; GN = Ndas_5030 PE=
MPGIPVIEPYALPAAGDLPENTAQWVPDPSRAVLLVHDMQRFFLKPFPEQVRDELVGNIALLRERGARLGVPVGYTAQPGSMSDEQRGLLKDFWGPGMRRSPEDRLVVDELAPSPDDWMFTKLRYSAFHKSDLLERMRAAGRDQLVVCGVYAHVGVLMTAVEAYTNDIQTFLVADAVADFNADYHRMAVRYAAERCAVVLPAKEVFA

SEQ ID NO: 92728 - protein, 224 aa, Nocardiopsis sp.
  REGION 1..224: note = tr|A0A1R3UQC4|A0A1R3UQC4_9ACTN Isochorismatase of siderophore biosynthesis OS=Nocardiopsis sp. JB363; OX = 1434837 GN=BQ8420_19985 PE=4 SV=1
MTIRRGLHYPMPDDPPTNTVSWSPDPRRAALLIHDMQNYFVDFFRAGSSPVTELVANCVRLREAADRWGIPVFYTAQPGSMTSEERGLLHDFWGPGMSAEGTGPGTPRAVIPELALRDGDTLLTKWRYSAFVRSDLDARLRAAGRDQLIICGVYAHVGCLMTASDAFARDVEPFLVSDAVADFSEKEHRMALDYGALRCAAVLPTDRVLTDLDAAVLQMTAGER

SEQ ID NO: 92729 - protein, 200 aa, unidentified
  source 1..200: note = Nonomuraea gerenzanensis
  REGION 1..200: note = tr|A0A1M4EKR7|A0A1M4EKR7_9ACTN Isochorismatase; OS = Nonomuraea gerenzanensis OX=93944 GN=BN4615_P8978 PE=4; SV = 1
MTVSTTLRDVIGLDNALPALSASTLILIDLQNTYRTGVMALPDAERALDSAARLLERARAAGTSVIHVINDGGEGTPYDIRAEIGQIAPQVAPQDGEPVVVKGFPNSFHETSLLETLRGLEAGPDLVLAGFMTHMCVQFTAQGAFNLGYRPTVVAEACATRSLPGVEGTTIAAEALHAAALTTIGDLFGPVAANVADLPA

SEQ ID NO: 92730 - protein, 219 aa, Novosphingobium sp.
  REGION 1..219: note = tr|A0A158RYN4|A0A158RYN4_9SPHN Putative Isochorismatase family protein OS=Novosphingobium sp. KN65.2 OX=1478134 GN=SPHV1_2170006 PE=4 SV=1
MTITATATPGKSLISPSNHMLVLIDFQSQMSFATKSIAPELLRNNAALISRGAKSFDVPTILTTVAEKSFSGPMFDEIVDAFEGQPMLDRTSMNTWEDEAVIGEVNRIGKSRVVFAGLWTSVCIVGPVASAIDQGFEAYVITDACGDISEEAHERAVQRMIQLGAVPMTSLQYLLELQRDWARTETYDSTTGIARKWGGAYGIGINYAKTMFGASEGGH

SEQ ID NO: 92731 - protein, 182 aa, unidentified
  source 1..182: note = Oceanibacterium hippocampi
  REGION 1..182: note = tr|A0A1Y5TZM6|A0A1Y5TZM6_9PROT Putative isochorismatase OS=Oceanibacterium hippocampi OX=745714; GN = phzD PE=4 SV=1
MLIDPARSLLLIVDMQEKLLPAMSGTDRQSVLDNCVKLMTAARELGCPILVTEQYPQGLGPTVEAIRALVGEENVIAKTAFSALGEERVRDRLADSGLDQVVIAGIEAHVCVAQTALGLAELEVPTFVVADATTAREPANRERAEARLRAAGVDIVSTEMVIFEWLRDSANPSFKALSPLIR

SEQ ID NO: 92732 - protein, 231 aa, Oceanicaulis sp.
  REGION 1..231: note = tr|A0A0P7V559|A0A0P7V559_9RHOB Isochorismatase; OS = Oceanicaulis sp. HLUCCA04 OX=1666904 GN=HLUCCA04_06600; PE = 4 SV=1
MIQRFEPTMIRSEQTAREIFEEVRANPARARFGFGQKLAILNVDPQNAYTRPDLFPKTAYVTDPDQLSHINRISKAARAKGLPVIWTHVAYMDNAADAGVWGTRTDTPDSLQNIKYGSDRHAFDARLEIDEAVDAVYTKRMPSAFFETPLASFLTWHRVDTVVITGGSTSGCVRATAVDALSHGYRAIVPVECVADKHESYHFASLTDLQLKYADVVEVREVDDWIAGYGG

SEQ ID NO: 92733 - protein, 294 aa, Oceanobacillus iheyensis
  REGION 1..294: note = tr|Q8CV00|Q8CV00_OCEIH Isochorismatase (2,3 dihdro-2,3 dihydrobenzoate synthase) OS=Oceanobacillus iheyensis (strain DSM 14371 / CIP 107618 / JCM 11309 / KCTC 3954 /HTE831) OX=221109 GN=dhbB PE=4 SV=1
MSIPSIASYTLPTENELPKSKVDWKAEASRSVLLIHDMQQYFLDFYGQDSPLIQQLIQNISTIKETCTKLGIPTIYTAQPGDQNQEDRALLTDFWGPGLDDDIEQTKITDQLAPTEDDMVQTKWRYSAFKKSQLLEWMQENGKDQLIICGVYANIGCIVTAVEAFMSDIQPFIVADAMADFSKEQHEEALVFGAGRCARPLMMKQLIEDISSEETITVQSIKVQVAEMLEVSPDQLNEQDDLIESGLDSIRIMMLAEDWSSKGIDISFIEMIESPTLEAWYQKLVPEYETIQVK

SEQ ID NO: 92734 - protein, 190 aa, Ochrobactrum haematophilum
  REGION 1..190: note = tr|A0A2P9HBZ2|A0A2P9HBZ2_9RHIZ Isochorismatase; OS = Ochrobactrum haematophilum OX=419474 GN=OHAE_4406 PE=4; SV = 1
MTLKSMLLVMDMMNDLVHPDGAGAKTYVPLMRERDVYGATKRAIARARAGKVPVGYVRVGFSPDYREVSDRSPVFTGARKAGIFKLGSWGTEVYADFAPEAGDADIVKHRVSPFYGTALCPLLSAREIGRLVLAGVSTNGVVSAAVREGHDRDYECVVLEDCCAGSTSEEHEFALAGLRRFSKIMTSADF

SEQ ID NO: 92735 - protein, 86 aa, Oerskovia enterophila
  REGION 1..86: note = tr|A0A163T4M0|A0A163T4M0_9CELL Isochorismatase; OS = Oerskovia enterophila OX=43678 GN=entB PE=4 SV=1
MTATTRPPVPTREQALADLVDVLGVGGSAAHEIGLDDDLTDHGLDSVRLMALLERWRAAGWPVEFAQVAVEPTLRGALRALGVPTP

SEQ ID NO: 92736 - protein, 189 aa, Oleispira antarctica
  REGION 1..189: note = tr|R4YKI9|R4YKI9_OLEAN Isochorismatase OS=Oleispira antarctica RB-8 OX=698738 GN=OLEAN_C07660 PE=4 SV=1
MTTENTTALLLIDFQNDYFSTYNGAKNPLVGTEAAAEQGAKLLAKFRQQGLPVVHVRHEFPTDEAPFFLPGSDGAKIHPSVAAQEGEAVVLKHQINSFRDTDLKKVLDDAGIKKLVIVGAMTHMCIDAVTRAAEDLGYECAVAHDACATLDLEFNGITVPAAQVHAAFMSALSFAYANVASADELIAGL

SEQ ID NO: 92737 - protein, 71 aa, Oligella ureolytica
  REGION 1..71: note = tr|A0A378XHY8|A0A378XHY8_9BURK Isochorismatase; OS = Oligella ureolytica OX=90244 GN=dhbB PE=4 SV=1
MQEELINIVAKALEIAPEEIAVEDNLMVVGLHSLALMTITEQIAQRYNRPVSFAALMQNPTIQAWEQLLNS

SEQ ID NO: 92738 - protein, 186 aa, unidentified
  source 1..186: note = Orrella dioscoreae
  REGION 1..186: note = tr|A0A1C3K554|A0A1C3K554_9BURK Isochorismatase; OS = Orrella dioscoreae OX=1851544 GN=ODI_01886 PE=4 SV=1
MPAWLDAEDSVFLIVDMQERLMPAIAGQAEQLATADRLARAARLLDIPVVATAHQAAKLGGTVAPLAASVRRTFPKTHFSAAREPGFVAWLPAARRTVLVAGAEAHVCVLQTVLGLLAEGLRVAMVEDAVGSRHAADKAAALRRAAAAGADIVTAEMVLFEWLGHCEHPQFPAVLALIKERAAPGV

SEQ ID NO: 92739 - protein, 317 aa, Paenibacillus alvei
  REGION 1..317: note = tr|K4ZMQ1|K4ZMQ1_PAEA2 Isochorismatase DhbB; OS = Paenibacillus alvei (strain ATCC 6344 / DSM 29 / NBRC 3343 / NCIMB 9371 / NCTC 6352) OX=1206781 GN=dhbB PE=4 SV=1
MGLPTILPYRMPSEAELPENRVDWSPDPSRAVLLIHDMQQYFVDAYQAGESPLVELIANIKELRERCTELGIPVVYSAQPGGQTPEQRGLLQDFWGAGINDGPYQKKFIDELAPRVNDILMTKWRYSAFQKTNLLEILRERGRDQLLVCGIYAHIGCLMTSCEAFMQDVQPFLIADAVADFSLDKHHMALTYAAERCAVVATTERVLNALNRHAAEQESEETAGAEAGCSVTLQSVRETVAELLQEEPSAIGDQDNLITQWGMDSIRIMSLVERWRRSSIAVSFVELAERPTVASWWELLSAKLSSNSVPNYDYYSI

SEQ ID NO: 92740 - protein, 192 aa, Paenibacillus illinoisensis
  REGION 1..192: note = tr|A0A2W0CQC8|A0A2W0CQC8_9BACL Isochorismatase; OS = Paenibacillus illinoisensis OX=59845 GN=PIL02S_05250; PE = 4 SV=1
MKEHLYQFSKTALIVIDLQKWIGNQYAPHSAEQVVERASAMVQTFREAGAFVGLVRVSSKDFKDMPRPLLDQEPPAINLVPGWDEIVAEIGVTANDHLITKRQWGAFYGTDLDQQLRRRGITTIVLCGIASGIGVDTTAREAYSHGYQVIFAIDAMTGFSEAEHEHVRQIIFPRIGRIRTTDEILACAALQS

SEQ ID NO: 92741 - protein, 308 aa, Paenibacillus larvae
  REGION 1..308: note = tr|V9W645|V9W645_9BACL Isochorismatase DhbB; OS = Paenibacillus larvae subsp. larvae DSM 25430 OX=697284; GN = dhbB PE=4 SV=1
MAIPAISAYSMPSISDLPNNKVTWKADPKRSVLLIHDMQEYFLDAYRTGESPKVELIENIQFLRNQCKQFGIPVIYTAQPGGQTLQQRGLLQDFWGPGIPDGPYKKRIVEELSPDENDIFLTKWRYSAFKKTNLLDILHEHGRDQLIICGVYAHIGCLLTACDAFMEGIEPFFVADAVADFSLDHHKMAMKYASERCAVTTTTHLLFKEQKSSQASVKKDCSLTLELVRKQVAELLYESLEGISDYEDLIHRGLDSVRIMSLVEKWRLIGADITFARLAERPTISDWWSLLSSQAQSTMSQTDYVIKG

SEQ ID NO: 92742 - protein, 185 aa, Paenibacillus pasadenensis
  REGION 1..185: note = tr|A0A2N5N1M2|A0A2N5N1M2_9BACL Isochorismatase; OS = Paenibacillus pasadenensis OX=217090 GN=B8V81_2668 PE=4; SV = 1
MAQALLVIDVQKDLVEGNGGEVPIFEPERLFAAIGKAVEQAERAGARIVFVRDKSIGGGEGEGFDVHPALRIPPDAVLFDKTAVSSFHETGLLEHLREHDVTHCVIAGCMTQYCIDTAVRAATLHGFDVTLVRDGHSTSDSPVLPAEQIIAHHNATLHGYANNGPFALARPADDPLFEPPHDKYR

SEQ ID NO: 92743 - protein, 176 aa, Paenibacillus polymyxa
  REGION 1..176: note = tr|A0A378XWH9|A0A378XWH9_PAEPO Amidase; OS = Paenibacillus polymyxa OX=1406 GN=NCTC10343_01243 PE=4; SV = 1
MGQTVLLLIDVQQAMFMYDEKLYREQEVVAHLQQLLTEARASGTPVIFVQHTDEADEDFRENSLGWAIADVVRPLPHERIVRKSSWDSFYQTELRHVLQGLGASQLIIAGMQTEFCLDTTCRSAYSLGYQNNVLVSDAHSTFDSKVLSGEQIVAHHNAVLGNRFARLLTTADVHFS

SEQ ID NO: 92744 - protein, 328 aa, Paenibacillus sp.
  REGION 1..328: note = tr|A0A2M9N4D4|A0A2M9N4D4_9BACL Isochorismatase; OS = Paenibacillus sp. GM2FR OX=2059268 GN=dhbB PE=4 SV=1
MALPKILPYPMPGEADLPKNKVAWTADPNRAVLLIHDMQQYFIDAFTPDQSPVVELLTHIQKLRSCCAELGIPVIYSAQPGGQAPEQRGLLQDFWGSGINDGPYQKKFVDAVAPSEQDMLLTKWRYSAFQKTNLHDIMREQGRDQLMICGIYAHIGCLLTASEAFMKDIQPFFIADALADFSEEKHRLALVYAAERCAVTLTTERLVASLITQEQRFVSEHSKAPSGEANTVDAAKGQSLLTLQTLRENVAELLQEQPLSIGEDDHLIEYWGLDSIRIMSLAERFRREGLDISFVELAEQPTLAGWWGLLSDKQNVCVSPPNYDYYTV

SEQ ID NO: 92745 - protein, 326 aa, Paenibacillus thiaminolyticus
  REGION 1..326: note = tr|A0A378X817|A0A378X817_PANTH Isochorismatase; OS = Paenibacillus thiaminolyticus OX=49283 GN=dhbB PE=4 SV=1
MALPSILPYPMPAESELPANKVAWTPDPKRAVLLIHDMQQYFVDAFNADESPVPELVENIRELRAQCAALGIPVVYSAQPGGQSPERRGLLCDFWGPGMNDGPDQKKIVEPLAPGEQDIVVTKWRYSAFQKTELLDILRQQGRDQLIVCGIYAHIGCLMTACEAFMQDVQPFFVADAVADFSADKHRMALAYAAERCAVTITTRHLVEDLARLGDSASISESAPASEPSLQAPPEGEPLPLTRQAVRVEVAGLLQEHPSRIADDDNLIHIWGLDSIRIMSLIERWRRGGTEVSFSELAERPTLADWWQLISSRMSRSLPNGDYFTV

SEQ ID NO: 92746 - protein, 162 aa, Paenibacillus xylanexedens
  REGION 1..162: note = tr|A0A3N6EKI9|A0A3N6EKI9_9BACL Isochorismatase; OS = Paenibacillus xylanexedens OX=528191 GN=EDO6_00202 PE=4; SV = 1
MKVGLLIVDMQESIVRKKMDQTSIDHACEYINHVAGVLRTNNHVVIHVQDVEGMEEAAPDEYRIIPEVDVNEKDITVTKEASNAFWQTDLEQVLKSHGIELVIIAGFAAEECVLFTYNGAMERGFRPVMLQNGILSTHHEAVISTYRDRNVISYPVVDYLIH

SEQ ID NO: 92747 - protein, 64 aa, unidentified
  source 1..64: note = Paeniclostridium sordellii
  REGION 1..64: note = tr|T0CQG4|T0CQG4_PAESO Isochorismatase family domain protein OS=Paeniclostridium sordellii ATCC 9714 OX=1292036; GN = entB PE=4 SV=1
MYLSVCSTLKAYFNQNNIDKNIIVPMNLVDTYHIDNIHNAEIMNIVFLNSMIQNGVEVIKEIEL

SEQ ID NO: 92748 - protein, 229 aa, unidentified
  source 1..229: note = Paeniglutamicibacter gangotriensis
  REGION 1..229: note = tr|M7N5J7|M7N5J7_9MICC Isochorismatase; OS = Paeniglutamicibacter gangotriensis Lz1y OX=1276920; GN = ADIAG_03558 PE=4 SV=1
MCGSPVGADPAVCFGNKTGRGIPPRARSDPATVQECHTADMDEHLEGSKTALIIVNMQQGVLDHCVHPKKVLTRIADLVSRARDTGTPIYWVQDDREFERHSAGWRLAAGLEAQDDEHRIFKSYRDAFTGTGLHASLIAEDVGHLVVCGAQSDYALRTAAGRAASMGYDVTVVRDAHTTGAETFEGQTLTGDQIIAHTNAYFATLDYPNQDFLLKHTHEVVFQPVSVHD

SEQ ID NO: 92749 - protein, 220 aa, Palleronia marisminoris
  REGION 1..220: note = tr|A0A1Y5THF8|A0A1Y5THF8_9RHOB Isochorismatase; OS = Palleronia marisminoris OX=315423 GN=dhbB PE=4 SV=1
MALPTIPDYDLPADDLPAARVPWQLEPGRATLLIHDMQRYFCAAYGDGAVDRPDTPIGQAARGIAAIAQAARSAGIPVFYTAQKGNQLPADRGLQADFWGPGMKATPEHEEIVAPLSPAAGDLVLHKHRYSAFQRSNLETLMRARGRDQIIVTGIYAHIGCLATAAEAFQRDIQPFFVADALADFDRARHDMAVAWVAGCCGVPLTAADVVGAIGTGTGA

SEQ ID NO: 92750 - protein, 284 aa, Pantoea sp.
  REGION 1..284: note = tr|E6WIM0|E6WIM0_PANSA Isochorismatase OS=Pantoea sp. (strain At-9b) OX=592316 GN=Pat9b_0483 PE=4 SV=1
MAIPKLTSYPLPTTTELPANKVKWTLEPQRAALLIHDMQAYFLNFWGENSPLVNQVVENIARLRAYCKAQGIPVFYTAQPNQQSDEDRALLNDMWGPGLNKHPDQQKIVDALAPDQDDHVLTKWRYSAFHRSPLESILQEMGRDQLIITGVYAHIGCLTTATDAFMRNIQPFMVADALADFTREEHMMALTYTAGRSGKVVMTADLMPLPLSKDELRALILPLLEDDDVPEDDENLIDYGLDSVRVMALAARWRQVHSDIDFVSLAKNPSIDGWWALLSRESAK

SEQ ID NO: 92751 - protein, 284 aa, Pantoea vagans
  REGION 1..284: note = tr|E1SC63|E1SC63_PANVC Isochorismatase OS=Pantoea vagans (strain C9-1) OX=712898 GN=entB PE=4 SV=1
MAIPQLTSYPLPDATELPNNKVKWTLEPGRAALLIHDMQRYFLNFWGDNSPLVKQVVDNIVRLRRYCKAQGIPVFYTAQPNAQSDEDRALLNDMWGPGLNKHPDQKKIVEALTPDEHDQVLTKWRYSAFHRSPLEAILQEMGRDQLIITGVYAHIGCLTTATDAFMRNIQPFMVADALADFSREEHMMALTYTAGRSGKVVMTADLMPVPLSKDELRMLILPLLEDDEVPDDDENLIDYGLDSVRVMALAARWRQVHRDIDFVSLARNPSIDGWWALLSREPAE

SEQ ID NO: 92752 - protein, 218 aa, Paracoccus denitrificans
  REGION 1..218: note = tr|A1B4M9|A1B4M9_PARDP Isochorismatase OS=Paracoccus denitrificans (strain Pd 1222) OX=318586 GN=Pden_2383 PE=4; SV = 1
MALPGIAPYAPPTEAELPKARGPWQPDRDRLALLVHDMQRYFCRVYPEGAPLAPVIGNIARLIHAARAAGVPVFYTAQKGNQFRPDRGLQADLWGPGMSATPEHEEILPELASATGDIVLVKHRYSAFQRSNLEQLMRARGRDQLMICGVYAHIGCLATAVEAFQRDIEAFAVADAQADFSREKQDMAMEWIAATCGVPLSTRQALEALGTHGVKSCA

SEQ ID NO: 92753 - protein, 78 aa, Paracoccus sp.
  REGION 1..78: note = tr|A0A447IMD8|A0A447IMD8_9RHOB Isochorismatase; OS = Paracoccus sp. M1-83 OX=2491866 GN=dhbB PE=4 SV=1
MTLTLDRMRADIAKAIHMDPSEIRDDDHLGDLGLDSLRLMRLVLAWEEAGLTADFSLFAEYETLGDWWTHIVAPAQGA

SEQ ID NO: 92754 - protein, 78 aa, Paracoccus yeei
  REGION 1..78: note = tr|A0A1V0GRI9|A0A1V0GRI9_9RHOB Isochorismatase; OS = Paracoccus yeei OX=147645 GN=A6J80_08725 PE=4 SV=1
MTVKTDLSPAWLAARVQKMIEDDCDIDPAENLVLYGLDSIAVMTFSSELKQMGVEASFEELAREPTLDAWWALIQPRL

SEQ ID NO: 92755 - protein, 205 aa, unidentified
  source 1..205: note = Paraglaciecola polaris
  REGION 1..205: note = tr|K6Z6Z7|K6Z6Z7_9ALTE Isochorismatase; OS = Paraglaciecola polaris LMG 21857 OX=1129793; GN = GPLA_1045 PE=4 SV=1
MNKKTTNDHDLSVGSLTLGSRPALVIIDMSLGFTQSESRLGGDFTAEVDNIKHLLEQFRARDLPILYTTVVYHNEQQARVFRTRLPDLNILQANSKWVQIDPRITPRPDEPIIEKCWASGFFKTDLHTHLQNKNADSIVVVGLTTSGCVRATAVDGLQHDYPVFVVPQGCGDRNLTAHNASLHDINAKYGVVVSLEELCGALAQL

SEQ ID NO: 92756 - protein, 194 aa, unidentified
  source 1..194: note = Pararhodospirillum photometricum
  REGION 1..194: note = tr|H6SLH4|H6SLH4_PARPM Isochorismatase hydrolase; OS = Pararhodospirillum photometricum DSM 122 OX=1150469; GN = RSPPHO_02213 PE=4 SV=1
MPFGELPMTAPVPSLIKADESVLVIIDVQEKLCPVMADPRRVLLNGSRLLRAANRLGVPVVVTEQYPKGLGPTMHDIRVDMPQGAMVEKRFFSAALEPAVRERLESLGRRQAVLCGIEMHVCVTQTALGLKDQGWSVFVVEDACSSRSPESVAQAKQRLATQGIPLVNVEMALFEWLATKDHPAFKEISTTLIR

SEQ ID NO: 92757 - protein, 206 aa, Pectobacterium atrosepticum
  REGION 1..206: note = tr|Q6D3P2|Q6D3P2_PECAS Putative phenazine antibiotic biosynthesis protein OS=Pectobacterium atrosepticum (strain SCRI 1043 / ATCC BAA-672) OX=218491 GN=ehpB PE=4; SV = 1
MAIPQIEEYDLGSPALSVKNSVSWNIEPSRSLLLVHDMQDFFLAPLPTMLRNTLIKNCEKLIDWARKHSIPIVYTGQKGNMTPKERGLLYDFWGAGMNAEPAHTKITSALSPQPEDHVLKKWRYSAFFSSPLDEIFNRNQKDQIIICGVYAQIGILTTALDAYSRDIEVFLVQDGIADFSCALHQNMLTYAASCCASILPVEEVLK

SEQ ID NO: 92758 - protein, 291 aa, Pectobacterium carotovorum
  REGION 1..291: note = tr|C6DJV7|C6DJV7_PECCP Isochorismatase; OS = Pectobacterium carotovorum subsp. carotovorum (strain PC1) OX=561230 GN=PC1_0464 PE=4 SV=1
MAIPSIASYPLPRAQDFPENKVSWAFEPERAVLLIHDMQDYFVNFYGADSPLAQQLIENIAALRTYCKARGIPVVYTAQPNAQSAADRALLNDMWGAGLNNHPDKQRVVSALAPDEHDTVLVKWRYSAFHRSPLEPMMKEMGKDQLIICGVYGHIGCMITATDAFMRDIKPFMVGDAVADFSLQEHQMALKYVATRAGRVVSTAELTGAKMAQTLTKQGLRAHLLTLIDEEEDQFDEDENLIDYGLDSVRMMALLTEWRNQGVTLSFVDLARNPSLNAWWALIEKQQGAAS

SEQ ID NO: 92759 - protein, 160 aa, Pediococcus damnosus
  REGION 1..160: note = tr|A0A0R2HVX2|A0A0R2HVX2_9LACO Isochorismatase; OS = Pediococcus damnosus OX=51663 GN=ADU72_1327 PE=4 SV=1
MADVLIVIDMQNALKRMANFDKVVAGINERIALYRQARKAIFFVQTADDEIPSDTKKFQLAADLDFNEQRDEFIVKTTPDAFYHTNLEAYLKNYNTKSLEVCGGQAEYCVDTTIRVARHLDYQVEVKRDLVTTFDSKLLDAATIVKHHESVWDGTFAKLI

SEQ ID NO: 92760 - protein, 84 aa, unidentified
  source 1..84: note = Pelagibaca abyssi
  REGION 1..84: note = tr|A0A1P8UR15|A0A1P8UR15_9RHOB Bifunctional isochorismate lyase / aryl carrier protein OS=Pelagibaca abyssi OX=1250539 GN=Ga0080574_TMP1485 PE=4 SV=1
MTLHRPMTPLTKDDMRADIAQVLDVAPESIADGDSLLDHGLDSLRAMDLVTRWEARVPHLDYIDFFEVETLDEWWAVVERTRRA

SEQ ID NO: 92761 - protein, 177 aa, unidentified
  source 1..177: note = Pelagicola litorisediminis
  REGION 1..177: note = tr|A0A1Y5R6W4|A0A1Y5R6W4_9RHOB Putative isochorismatase OS=Pelagicola litorisediminis OX=1312363; GN = phzD PE=4 SV=1
MLTLNSASSDLLVIDFQTRLMPAIHDSDAVISNAFSLIEAARYLNLPLTYTEQNPEKLGHTLTKLAPYPGEVLHKMTFDALRTPKVAGHIDGTNAIVVAGCEAHVCVLQTVLGLIDAGRQVFVVADAVGSRTPQNRRAALERMARHGAEIVTTEMVIFEWLGSAEHPSFRDILKLVK

SEQ ID NO: 92762 - protein, 300 aa, Pelosinus fermentans
  REGION 1..300: note = tr|I8U5M6|I8U5M6_9FIRM Isochorismatase OS=Pelosinus fermentans JBW45 OX=1192197 GN=JBW_01673 PE=4 SV=1
MAIPAISPYSMPMASDFPQNKVSWKANPKRSVLLIHDMQQYFLNAYTLGESPIIQLIENIQLLKAQCTELGIPVVYTAQPGDQRPEDRALLQDFWGPGLADDPSQTKVIDEITPNASDTVLTKWRYSAFKRTKLMEIMQEQGRDQLIICGVYAHIGCLLTACDAFMQDVETFFVCDAVADFSADHHKMAMTYAADRCAVTTSTTLLLDQLKSIQLSPNKAVTKASLHSLTQQLVRQQVAELLGETSSDIDDNEDLIDRGLDSIRIMSLVETWRSKGADVTFVKLAAGPTISAWWNLLSAK

SEQ ID NO: 92763 - protein, 183 aa, Peptoniphilus indolicus
  REGION 1..183: note = tr|G4D0U9|G4D0U9_9FIRM Isochorismatase; OS = Peptoniphilus indolicus ATCC 29427 OX=997350; GN = HMPREF9129_0029 PE=4 SV=1
MKNFNLDRDKTLFLFIDVQDKLLNVMSNKEDVLKNTKILAQMAKIMNLESIFTAQYPKGLGFSNEELKSFLPEAKEIGKESFSCMLNDEFVEEFKSKDKKQIVVSGVESHICVLLTARDLIANGYEVFIASDAVGSRSDFNYKNALQMLSEMGCVITNTETIMFDLNSVAGTDEFKAIQKLIM

SEQ ID NO: 92764 - protein, 206 aa, Phaeospirillum molischianum
  REGION 1..206: note = tr|H8FWA7|H8FWA7_PHAMO Putative isochorismatase; OS = Phaeospirillum molischianum DSM 120 OX=1150626 GN=phzA; PE = 4 SV=1
MNAIPTIEAYSLPKLNDLPANRAKWIPDPRRSVLLVHDMQHYFLRPLPESLRAELVGNAARLLQKCVEQGVQVAYTAQPGNMTNEQRGLLKDFWGPGMQASPADREIIEELRPRRDDWLLTKWRYSAFFHSDLLERMRAAGRDQIILCGVYAHIGVLISTVDAYSNDIQPFLVADAIADFSQKDHWMAMEYAARRCAMVITTDEAL

SEQ ID NO: 92765 - protein, 46 aa, Photobacterium aphoticum
  REGION 1..46: note = tr|A0A090QPJ8|A0A090QPJ8_9GAMM Isochorismatase; OS = Photobacterium aphoticum OX=754436 GN=JCM19237_2324; PE = 4 SV=1
MGDAHTTHDKDHATGEQIRTHHNATLPNITSFSVKIDVVSVASLIQ

SEQ ID NO: 92766 - protein, 187 aa, Photobacterium damselae
  REGION 1..187: note = tr|D0YY93|D0YY93_PHODD Isochorismatase; OS = Photobacterium damselae subsp. damselae CIP 102761; OX = 675817 GN=VDA_002256 PE=4 SV=1
MNKALIAIDFINDIVDAKGKIPSCAEQVKTHRVIDKANLAISWARNQHIPVIFVKVGFQDNYFAQPKHSPIFGKADQFGALNLSGWGTEFHCDLDVQPHDSVVIKPRVNPFYNTSLDAMLRANKIEQLYFCGVSTSWAIQSAVRDAHDRDYQVHLITDACASHSYEDHQASLAMLERLVTPHLAEEL

SEQ ID NO: 92767 - protein, 291 aa, Photorhabdus asymbiotica
  REGION 1..291: note = tr|C7BNH4|C7BNH4_PHOAA Isochorismatase; OS = Photorhabdus asymbiotica subsp. asymbiotica (strain ATCC 43949 / 3105-77) OX=553480 GN=phbB PE=4 SV=1
MSIPKLNSYDLPVAEELPTNKVNWSLDKNRAALLVHDMQNYFLNFWEENSPLINQVVANIARLVETCRENGIPVFYSAQPNQQSDEKRALLNDMWGPGLNCHPELQKITDMLVPQAGDTVMEKWRYSAFQRTDFEQQLKVAGRDQLIICGVYAHIGCLMTATDAFMRDIQPFMVADALADFSYEEHMMALKYTAGRCGRVETTEQLLIALNAKQVQWNKTRLKGLLLPLLDEDSGDIGDDENLLDYGLDSVRIMSLISHWRQQGYEVDFISLMKNPTVNGWMALFTEHQGA

SEQ ID NO: 92768 - protein, 291 aa, unidentified
  source 1..291: note = Photorhabdus australis
  REGION 1..291: note = tr|A0A1C0U9V9|A0A1C0U9V9_9GAMM Isochorismatase; OS = Photorhabdus australis OX=286156 GN=entB PE=4 SV=1
MSIPKLNSYDLPVAEGLPTNRVNWSLDKNRAALLVHDMQNYFLNFWEENSPLINQVVANIARLVETCRENGIPVFYSAQPNQQSDEKRALLNDMWGPGLNWHPELQKITDALAPQAGDTVMDKWRYSAFQRTDFEQQLRISGRDQLIICGVYAHIGCLMTATDAFMRDIQPFMVADALADFSYEEHMMALKYTAGRCGRVETTEQLLAALNAKQVQWNKTRLKGLLLPLLDGDSGDIGDDENLLDYGLDSVRIMSLISHWRQQGYEVDFISLMKNPTINGWITLFTEHQGA

SEQ ID NO: 92769 - protein, 291 aa, unidentified
  source 1..291: note = Photorhabdus khanii
  REGION 1..291: note = tr|W3V3Q2|W3V3Q2_9GAMM Isochorismate hydrolase; OS = Photorhabdus khanii NC19 OX=1004151 GN=PTE_04188 PE=4; SV = 1
MSIPKLNSYDLPVAEGLPTNKVNWSLDKNRAALLIHDMQNYFLNFWEENSPLINQVVTNIARLIEICRENGIPVFYSAQPNQQSDEERALLNDMWGPGLNCHPELQKITDALAPQAGDIVMDKWRYSAFQRTDFEQQLKIAGRDQLIICGVYAHIGCLMTATDAFMRDIQPFMVADALADFSYEEHMMALKYTAGRCGRVETTEQLLVALDVKQVQWNKTRLKALLLPLLDEDSDDIGDDENLLDYGLDSVRIMSLISHWRQQGYEMDFISLMKNPTINGWMTLFTERQGA

SEQ ID NO: 92770 - protein, 214 aa, Photorhabdus luminescens
  REGION 1..214: note = tr|A0A022PGZ1|A0A022PGZ1_PHOLU Isochorismate hydrolase OS=Photorhabdus luminescens BA1 OX=1393736; GN = BA1DRAFT_02653 PE=4 SV=1
MTIPSLKNYKLPQPKDFPGNKASWLLEPHKAILLIHDMQDYFLQFFGNNSPLVNKLIENIHLLKLFCKEKEIPIIYTAQPKVQSDEERALLNDIWGAGLNRSPHLQHISHALAPNNDDIVIVKWRYSAFQRSSLEENIKELGRDQLIICGVYGHIGCMITAVDAFMRDIKPFLVGDAIADFTLEDHLMALKYVAEKSGMVMSTKEIISSVNFDK

SEQ ID NO: 92771 - protein, 76 aa, unidentified
  source 1..76: note = Photorhabdus namnaonensis
  REGION 1..76: note = tr|A0A1B8YE04|A0A1B8YE04_9GAMM Isochorismatase; OS = Photorhabdus namnaonensis OX=1851568 GN=dhbB PE=4 SV=1
MKNQLIHEILHREIRALHPEVETIPEDENLFDIGFDSVKMLMLVDRLNDAGYPINFADLARWPTINDWIKLLAKDE

SEQ ID NO: 92772 - protein, 291 aa, Photorhabdus temperata
  REGION 1..291: note = tr|A0A081S276|A0A081S276_PHOTE Isochorismate hydrolase OS=Photorhabdus temperata subsp. temperata Meg1; OX = 1393735 GN=MEG1DRAFT_00419 PE=4 SV=1
MSIPKLNSYDLPVAEGLPTNKVNWSLDKNRAALLIHDMQNYFLNFWEENSPLINQVVTNIARLIEICRENGIPVFYSAQPNQQSDEERALLNDMWGPGLNCHPELQKITDTLAPQAGDIVMDKWRYSAFQRTDFEQQLKIAGRDQLIICGVYAHIGCLMTATDAFMRDIQPFMVADALADFSYEEHMMALKYTAGRCGRVETTEQLLVALDVKQEQWNKTRLKALLLPLLDEDSDDIGDDENLLDYGLDSVRIMSLISHWRQQGYEMDFISLMKNPTINGWMALFTERQGA

SEQ ID NO: 92773 - protein, 187 aa, unidentified
  source 1..187: note = Phycisphaerae bacterium
  REGION 1..187: note = tr|A0A518LMH6|A0A518LMH6_9BACT Vibriobactin-specific isochorismatase OS=Phycisphaerae bacterium RAS2 OX=2528035; GN = vibB PE=4 SV=1
MPHANMLEADLTALVVIDVQEKMLSAISSSTPDALVARMAVLVKTARLLDVPVIFTEQYPRGLGSTDAGLVETLAGATGPLEKTTCSCWRDEGFRAALQATEREHVILCGVETHVCIQQTALDLLRVDYVPFVPADAVGSRRPVDYQTALDRMRSAGVVVSTVESLMFELIERCDHPRFKEFLKLVK

SEQ ID NO: 92774 - protein, 283 aa, unidentified
  source 1..283: note = Phytobacter ursingii
  REGION 1..283: note = tr|A0A508UCN1|A0A508UCN1_9GAMM Isochorismatase; OS = Phytobacter ursingii OX=1972431 GN=entB PE=4 SV=1
MAIPKLTGYALPTANDIPDNKVQWAFEPDRAALLIHDMQEYFLHFWGENCPMMEKVVANIAALRQFCKQHHIPVYYTAQPKDQSDDDRALLNDMWGPGLTRSPEQQQIVAALAPDEADTVLVKWRYSAFHRSPLEQMLKETGRNQLIITGVYAHIGCMTTATDAFMRDIKPFMVADALADFSREEHLMSLKYVAGRSGRVVMTEALLTVPASKAALRALILPLLDESDEPYDDENLIDYGLDSVRMMALAARWRKVHGDIDFVMLAKNPTIDAWWTLLSREAN

SEQ ID NO: 92775 - protein, 210 aa, unidentified
  source 1..210: note = Phytophthora sojae
  REGION 1..210: note = sp|G4YEI5|ISC1_PHYSP Secreted isochorismatase effector Isc1 OS=Phytophthora sojae (strain P6497); OX = 1094619 GN=Isc1 PE=1 SV=1
MAALSSATKRLGRLIPHSSVLFVCDVQEVFRGLTFQLPTVIHGTNTMVSAAKLLNVPVVVTTQYGSRLGSTVSEISKNLEDAPDVKVFDKMKFSMLVPEVERHLTTNMPQRKSVLLCGIETHVCVLQTCLDLLDKGYDVHVVSDAVSSSTSYNRSMALERIRQSGAYITSVESAIFQLANDAGNPEFKSISKLIKEHLKVQNGFDTGARI

SEQ ID NO: 92776 - protein, 191 aa, Picrophilus torridus
  REGION 1..191: note = tr|Q6L1E6|Q6L1E6_PICTO Isochorismatase; OS = Picrophilus torridus (strain ATCC 700027 / DSM 9790 / JCM 10055 / NBRC 100828) OX=263820 GN=PTO0621 PE=4 SV=1
MRYPGVEKSIIIFINNDMEFFNNIFSKMEIIMALDYINHFVEKYKIPVISTRRPINYSTSNPELMEFKMEVDKRRLMGKVPESPMDKKFADDFTLKRLTGDDYSVFKEDIFYKTNLDKIIKEQNKIDLLLCGFFTDTDVFISAVSAYIKEFNVYIISDATSTYSERLYFQSLEMLSYFGTVIDTRDMEKYF

SEQ ID NO: 92777 - protein, 123 aa, Piscirickettsia salmonis
  REGION 1..123: note = tr|A0A095BEZ9|A0A095BEZ9_PISSA Isochorismatase; OS = Piscirickettsia salmonis OX=1238 GN=KU39_3010 PE=4 SV=1
MSLNQVNVLEACKSASVLWKNSFNNQDASGCAQQYSEGATMLAKPFGVFEGREQIQLFWQGIIDQGFNNVEYHDTEWLKEGEDGYLLTSKWSMNKAHGLIHKEHWRIQADGAALLEYDEFEVL

SEQ ID NO: 92778 - protein, 202 aa, Planctomyces sp.
  REGION 1..202: note = tr|A0A142WZ23|A0A142WZ23_9PLAN Isochorismatase; OS = Planctomyces sp. SH-PL14 OX=1632864 GN=entB PE=4 SV=1
MPHTNPDLHGSAPDKCDTALLLIDVINALDFPEADQLLPFAVPMADRIAALKRRAQAEGVPVIYVNDNFGRWRSDFRALVTHCRRPESRGREIVERLLPDDDDYFILKPKHSGFYSTALDTLLDYLGTRRILLTGVAGNICVLFTANDVYMRDLELVVPADCVASNTAEDNDYALAQMRTILKADTRPSDQIPMRSRPSAHC

SEQ ID NO: 92779 - protein, 178 aa, unidentified
  source 1..178: note = Planctomycetes bacterium
  REGION 1..178: note = tr|A0A1V6DAH0|A0A1V6DAH0_9BACT Vibriobactin-specific isochorismatase OS=Planctomycetes bacterium ADurb.Bin126; OX = 1852903 GN=vibB PE=4 SV=1
MLKPQETVLVLVDLQARLVPAMHEREALIQSAVRLVRGAQVLEVPILHTEQNPAGLGPTVEEIASLLTGSPLTKRAFSCCGEQDFLDALQSVGRRHVLLAGIETHVCVYQTAVDLLAAGYDVQVVGDIVSSRTQANRTVGLTRMAAAGAGVTSVETALFELLGRAEGPKFKEILAIVK

SEQ ID NO: 92780 - protein, 186 aa, unidentified
  source 1..186: note = Unknown
  REGION 1..186: note = tr|A0A484QG66|A0A484QG66_9ZZZZ Isochorismatase; OS = plant metagenome OX=1297885 GN=ANDO1_3220 PE=4 SV=1
MPAWLDAEDSVFLIVDMQERLMPAIAGQAEQLATADRLARAARLLDIPVVATAHQAAKLGGTVAPLAASVRRTFPKTHFSAAREPGFVAWLPAARRTVLVAGAEAHVCVLQTVLGLLAEGLRVAMVEDAVGSRHAADKAAALRRAAGAGADIVTAEMVLFEWLGHCEHPQFPAVLALIKERAAPGV

SEQ ID NO: 92781 - protein, 240 aa, Plautia stali
  REGION 1..240: note = tr|U3TSC4|U3TSC4_9ENTR Isochorismatase OS=Plautia stali symbiont OX=891974 GN=E05_19440 PE=4 SV=1
MAIPKLTSYALPAATELPANKVQWALEPQRAALLIHYMQAYFLNFWGEDSPLVNQVVENIARLRAYCKAQGIPVFYTAQPNQQSDEDRALLNDMWGPGLNKHPDQQKIVDALALESILQEMGRDQLIITGVYAHIGCLTTATDAFMRNIQPFMVADALADFSRDEHMMALTYTAGRSGKVVMTADLMPLPQSKDALRTLILPLLEDDDVPEDDENLIDYGLDSVRVMALAARWRDCHHRL

SEQ ID NO: 92782 - protein, 405 aa, unidentified
  source 1..405: note = Pluralibacter gergoviae
  REGION 1..405: note = tr|A0A379D3U8|A0A379D3U8_PLUGE Isochorismatase; OS = Pluralibacter gergoviae OX=61647 GN=entB_1 PE=4 SV=1
MMQAVVANIKALRDFAKRHDMPVYYTAQPKEQSDEDRALLNDMWGPGLTRSPEQQQIVADLAPDADDTVLVKWRYSAFHRSPLEQSLKETGRDQLIITGVYAHIGCMTTATDAFMRDIKPFFVADALADFSREEHLMSLKYVAGRSGRVVMTEDLLTLPSSKAALRAAILPLLDESDEPMDDENLIDYGLDSVRMMSLAARWRKVHADIDFVVLAKNPTIDAWWALLSPRGEVMAGFDFHGRRVWVTGAGKGIGYATALAFAEAGAEVVGFDLQFDKADYPFTTEVLDVADAGQVAETCRRLLAATPRLDVLVNAAGILRMGATDVISVDDWQQTFAVNVGGAFNLFQQTMAQFRQQRGGAIVTVASDAAHTPRIGMSAYGASKAALKSLALTVRSGAGGQRRAL

SEQ ID NO: 92783 - protein, 207 aa, Polaromonas sp.
  REGION 1..207: note = tr|A0A068YTK6|A0A068YTK6_9BURK Isochorismatase; OS = Polaromonas sp. CG9_12 OX=1504672 PE=4 SV=1
MLLDADDSQLVLIDYQTRLMPVIFENEIVVANALRLARMARILEVPVWGTAQNPDKLGQNLPELQAAIDSAGGKTMAKMHFSAAADGLVEWLRPPVRKAPTGGNARSLPKHLQKPAEPEDAGRSMIVMAGCEAHVCLMQTALELLEEEFDVWVVTDACSSRSERNRDAAFDRLAGNGAELVTTEMVAFEWARTCEHGAFRELLALVK

SEQ ID NO: 92784 - protein, 188 aa, Prochlorococcus marinus
  REGION 1..188: note = tr|A0A0A1ZHX6|A0A0A1ZHX6_PROMR Isochorismatase; OS = Prochlorococcus marinus str. GP2 OX=59925 GN=EU91_0133; PE = 4 SV=1
MNDQEISSDKLSPKVNALLIIDIQGKIMRTIFNKDSIIKNIKRLLSAYQILEENIFISEQNPLKLGVTIPELSPIAEFRKFEKMEFSLAKLEEFLKELKNKKITNLIVCGIETHICIQQTVLDFLQKGFEVILISDAMGSRNRVDHEIALQRMTQSGAILTTTESMIFELCKTADRKEFKEIKNIIMS

SEQ ID NO: 92785 - protein, 181 aa, Prochlorococcus sp.
  REGION 1..181: note = tr|A0A0A2BIZ2|A0A0A2BIZ2_9PROC Isochorismatase; OS = Prochlorococcus sp. MIT 0601 OX=1499498 GN=EV05_1807; PE = 4 SV=1
MSQQNTALIIIDVQEKLVTSIENKELIMWNINRLIDACKIFNMKIYVTEQNPEKLGKTIEQINKCLDFQAYKKMSFSSFHCKDLSRELKSNAFENIIICGIESHVCIMQSALDYINSGKNIFIPVDSIGSRRTIDHETSLQRLSMSGAIVTTTETAIFELCKSADFEDFKAVSSIIKRKME

SEQ ID NO: 92786 - protein, 231 aa, Propionibacterium freudenreichii
  REGION 1..231: note = tr|A0A0A8PA64|A0A0A8PA64_9ACTN Isochorismatase hydrolase OS=Propionibacterium freudenreichii OX=1744; GN = PFCIRM512_11620 PE=4 SV=1
MAKLDPEPIRDPQADQLLTPQNSVVVLIDFQPGQYATVGSVSREEIDLGVVTLAKLAHTYDIPTVVSTVAVGMGVNAPTVPQIMNELPGVDQIDRTGVNAWEDPEFRAAIEATGRRKIIMAGLWTEVCLAFPALDMIEAGYEIYPRGRRRGRCQPGDQRPRLRPDDPGRRAPDHRPGPRLRTDAQLGAPRHRRLPPHLQLVLPPAAQPWPARRQDPALGRTLIRPTPAPLS

SEQ ID NO: 92787 - protein, 300 aa, Propionispora sp.
  REGION 1..300: note = tr|A0A0K8JDI1|A0A0K8JDI1_9FIRM Isochorismatase; OS = Propionispora sp. 2/2-37 OX=1677858 GN=dhbB PE=4 SV=1
MAIPAILPYSLAFAAELPQNRVSWKAEADRSVLLIHDMQQYFLAAYQSENSPLAELLRNIQLLKKQCKELGIPVIYTVQPGAQKPEDRALLRDFWGPGLADEPEQTKIADAIAPDDQDIVLTKWRYSAFKRTRLLEIMRGQGRDQLIICGVYAHIGCLLTAGDAFMQDLETFFVGDAVADFSLDHHRIAINYAAGCCSFVTSTELVLSQLTDNRSFFGVVEDNSTQPLTLQRVRKQVAELLGETAADLTDHESLVDRGLDSIRMMSLVEQWRRISTDITFIKLAKEPTIYSWWELLSAKK

SEQ ID NO: 92788 - protein, 182 aa, Proteiniborus sp.
  REGION 1..182: note = tr|A0A1M4M1U9|A0A1M4M1U9_9FIRM Isochorismatase family protein OS=Proteiniborus sp. DW1 OX=1889883; GN = entB1 PE=4 SV=1
MDKFTLKQEEAVLMIIDIQERLVPAMKYGKKVIYNTNILISAAQKMHIPVIGTEQYPKGLGSTVSEISVNIDKDLIYEKMSFTGYTEEVKQALKSIGRKKVIITGMETHVCVFQTARDLLEDGYQVFIAEDAVCSRTKENYKNGLSLMDKMGAVISNTETIVFDLLKVSGTPVFKELSKLIK

SEQ ID NO: 92789 - protein, 191 aa, Providencia heimbachae
  REGION 1..191: note = tr|A0A1B7JHS8|A0A1B7JHS8_9GAMM Isochorismatase; OS = Providencia heimbachae ATCC 35613 OX=1354272; GN = M998_3685 PE=4 SV=1
MSQALIIIDLIEDIIGKNGLSNSSYQQTQARHIVEQANIAANYARSNNIPVIWVKVGFSDDYQDIPAGSPMFQQAKKNGALKLSGNGCSWVQDLEVHFRDPIMVKKGVSAFTGNKLNKWLIDNEITQLYLGGVSSLMAIQSSARQAHDLGYSVTVLEDLCAAATLELHEQSMQALQGMAKISSIKEFMQTK

SEQ ID NO: 92790 - protein, 203 aa, Pseudoalteromonas distincta
  REGION 1..203: note = tr|F3BFQ9|F3BFQ9_9GAMM Isochorismatase; OS = Pseudoalteromonas distincta OX=77608 GN=PH505_af00040; PE = 4 SV=1
MDDLSTTALVLIGFQNDYFSPKGILYDVVEESSRITGVVENTVSLLTSCAKHFALVVNTPIHFTQNYSELKNPIGILKVIADVGAFKAGSYGAQTIEQLDPFNNIIEVVPGKRGLNAFTHTALASKLKKHGVTNIILAGTVTSICIDSTARTAVELGFNVVILSDCTSSRTPFEQTFYCEEVFPLYASVCESDTFIKHWRGHG

SEQ ID NO: 92791 - protein, 181 aa, Pseudoalteromonas sp.
  REGION 1..181: note = tr|A0A1R4JA90|A0A1R4JA90_9GAMM Isochorismatase; OS = Pseudoalteromonas sp. JB197 OX=1434839 GN=CZ797_05570; PE = 4 SV=1
MSNVDALRSVLLIIDIQTKLEPAIADFSAILKCSLQLSQASLVHKIPTLITEQYKKGLGATNQTLQDALPQADYFHKTHFSACAEPGFLAQLAKYTRPQVVVIGTEAHVCVLQTCLDLLQYGYEVIIAVDAIGSRNDNHKIIATEQLRQAGAIISSTESIIFQWTKQAATPNFKKILPIIK

SEQ ID NO: 92792 - protein, 144 aa, Pseudomonas aeruginosa
  REGION 1..144: note = tr|V6AH38|V6AH38_PSEAI Putative isochorismatase; OS = Pseudomonas aeruginosa MH27 OX=1306165 GN=phzA PE=4 SV=1
MSGIPEITAYPLPTAQQLPANLARWSLEPRRAVLLVHDMQRYFLRPLPESLRAGLVANAARLRRWCVEQGVQIAYTAQPGSMTEEQRGLLKDFWGPGMRASPADREVVEELAPGPDDWLLTKWRYSAFFHSDLLQRMRAAGRDH

SEQ ID NO: 92793 - protein, 207 aa, Pseudomonas chlororaphis
  REGION 1..207: note = sp|Q51518|PHZA_PSECL Probable isochorismatase; OS = Pseudomonas chlororaphis OX=333 GN=phzA PE=3 SV=1
MTGIPSIVPYALPTNRDLPVNLAQWSIDPERAVLLVHDMQRYFLRPLPDALRDEVVSNAARIRQWAADNGVPVAYTAQPGSMSEEQRGLLKDFWGPGMKASPADREVVGALTPKPGDWLLTKWRYSAFFNSDLLERMRANGRDQLILCGVYAHVGVLISTVDAYSNDIQPFLVADAIADFSKEHHWMAIEYAASRCAMVITTDEVVL

SEQ ID NO: 92794 - protein, 197 aa, unidentified
  source 1..197: note = Pseudomonas entomophila
  REGION 1..197: note = tr|Q1ID69|Q1ID69_PSEE4 Putative isochorismatase; OS = Pseudomonas entomophila (strain L48) OX=384676; GN = PSEEN1524 PE=4 SV=1
MSSVPTTMFRLTGRDYPPAKLGQASLIVIDAQKEYLSGPLALSGMDEAVANIVRLLDAARKANRPIIHVRHLGTVGGRFDPQGPGGEFIPGLEPLEGEVVIEKRMPNAFKNTKLHETLQAFGPLDLIVCGFMSHSSVSTTVRRAKDYGYRCTLVEDASATRDLALKDTVISAAQIHQCEMAVMADNFACVAPTASLV

SEQ ID NO: 92795 - protein, 215 aa, Pseudomonas fluorescens
  REGION 1..215: note = tr|G8Q5F3|G8Q5F3_PSEF3 Isochorismatase family; OS = Pseudomonas fluorescens (strain F113) OX=1114970; GN = PSF113_3146 PE=4 SV=1
MASENIRNPQTDQLLSPENSALIIIDYQPIQVSSIRSMSRDELVFNITSVAKAAVNYNLPIIHSTVNVATGRNKPPIQELQDVLGHLPTYDRTSINSWEDTEFKQAVKAIGRRKLIMTALWTEACLTFPVLDAIQEGYEVYVPVDAVGGTSLAAHEAALRRMEQAGAKLISRVQMYCELQRDWARALTVPGFMGVFENFDGFNAEKAMEVRAKNA

SEQ ID NO: 92796 - protein, 185 aa, unidentified
  source 1..185: note = Pseudomonas furukawaii
  REGION 1..185: note = tr|L8MGW7|L8MGW7_PSEFK Isochorismatase; OS = Pseudomonas furukawaii OX=1149133 GN=ppKF707_0022 PE=4; SV = 1
MSKQALVVVDIQNDYFPGGLWTLTGADAAADNAARLIADARRRGELVVHIRHEFPTQDAPFFRPGSEGAQLHPKVANLAEEPVVLKHYINSFRETELKAVLDRHGIERLTVVGNMSHMCVDGITRAAVDFGYPVTVIHDACATLDLEFNGTRVPAAQVHAAFMAALAFGYAQVVSTEQFLAGQAA

SEQ ID NO: 92797 - protein, 186 aa, Pseudomonas orientalis
  REGION 1..186: note = tr|A0A3G7X6J0|A0A3G7X6J0_9PSED Isochorismatase; OS = Pseudomonas orientalis OX=76758 GN=C4J97_4863 PE=4 SV=1
MAKQALILIDIQNDYFPQGKWPLDGVEAAADNAAQVLQAFRQAGDAVIHVRHEFADDDAPFFTPGSEGANLHAKVLNQGNEPVVLKHFVNAFRQTNLRQLLEQRSITDVVVVGSMSHMCIDAVVRAAADLGYKVTVIHDACATRDQEFNGQVIPAAQVHGAYMASLAFGYAGVVSTDEYLKTQAAA

SEQ ID NO: 92798 - protein, 231 aa, Pseudomonas pseudoalcaligenes
  REGION 1..231: note = tr|W6RJ15|W6RJ15_PSEP5 Isochorismatase hydrolase; OS = Pseudomonas pseudoalcaligenes (strain CECT 5344); OX = 1182590 GN=BN5_3203 PE=4 SV=1
MTLSERFLVSEPYPWPYNGQLQPANTALIIIDMQTDFCGEGGYVDTMGYDLAAVRAPIEPINRVLKVMREQGFHIIHTREGHRPDLSDLPANKRWRSQRIGAGIGDAGPCGRILVRGEPGWELIPELQPLAGEVIIDKPGKGSFCATDLELILRTRGIENLILCGITTDVCVHTTMREANDRGFECLLLEDCCGATDPGNHLAALHMVKMQGGVFGAVSDSASLVELLSEH

SEQ ID NO: 92799 - protein, 196 aa, Pseudomonas putida
  REGION 1..196: note = tr|A0A379KDG5|A0A379KDG5_PSEPU Isochorismatase; OS = Pseudomonas putida OX=303 GN=phzD PE=4 SV=1
MSVPTTMFRLTGRDYPPAKLSQASLIVIDAQKEYLSGPLALSGMDEAVANIARLLDAARKAGRPIIHVRHLGTVGGRFDPQGPAGEFIPGLEPHDGEIIIEKRMPNAFKNTKLHETLQELGHLDLIVCGFMSHSSVSTTVRRAKDYGYRCTLVQDASATRDLALKDRVIPAAQIHECEMAVMADNFACVAPTASLI

SEQ ID NO: 92800 - protein, 188 aa, Pseudomonas savastanoi
  REGION 1..188: note = tr|Q48KJ6|Q48KJ6_PSE14 Isochorismatase family protein OS=Pseudomonas savastanoi pv. phaseolicola (strain 1448A / Race 6) OX=264730 GN=PSPPH_1848 PE=4 SV=1
MGIQDNGALILIDMQQGINHPKLGRRNNPQAEANIGALLSAWRQSGRPVIHVRHFSTSPQSVFWPEQSGVEYQSAFLPHADERELSKQVPDAFCGSFLEMWLRSDGIGQVVIVGVITNNSVESTARSGGNLGFDVLVAHDACFTFDQQDFFGTPRSAEDVHAMSLANLHGEYATVLSTAQILQQVAVE

SEQ ID NO: 92801 - protein, 210 aa, Pseudomonas sp.
  REGION 1..210: note = tr|A0A2N7R0Z9|A0A2N7R0Z9_9PSED Putative isochorismatase OS=Pseudomonas sp. AD21 OX=396378; GN = phzD_3 PE=4 SV=1
MSTATYNRLNKDDAVVLLVDHQTGLISLVQDFSPNEFKNNVLALADLAKFFNLPTILTTSFEQGPNGPLVPELKEMFPDAPYIARPGQINAWDNEDFVKAIKATGRKQIIIAGVVTDVCVAFPTLSALAEGFDVFVVTDASGTFNTTVQQAAWSRMTQAGAQMMNWFSVACELHRDWRNDIEGLGNLLSQRIPNYRNLMNSYSAITAAQK

SEQ ID NO: 92802 - protein, 289 aa, Pseudomonas stutzeri
  REGION 1..289: note = tr|A0A379LB45|A0A379LB45_PSEST Isochorismatase; OS = Pseudomonas stutzeri OX=316 GN=entB PE=4 SV=1
MAIPTLLPYSLPSEWSADKVQWSVDPARAVLLIHDMQAYFCDFWGEDSPFVAALVQRLARVRECCRALGIPVVYTAQPGEQSAAERALLTDVWGPGITQHPQRQAIVPGLTPAADDTLLVKWRYSAFQRSPLEHMMRELGRDQLIIGGIYGHIGCLMTACDAFMRDIQPFLLADGIADFSQAEHRMALDYVATRCGRVITCNELLSLRPAPASLTRESLQARLLTMLDEMDEPFDPDENLLDYGLDSIQIMTLLSEWREQGLELSFTDLAKTPTLNGWWALIGEHGGAR

SEQ ID NO: 92803 - protein, 207 aa, Pseudomonas synxantha
  REGION 1..207: note = tr|A0A0E3KE85|A0A0E3KE85_9PSED Isochorismatase of siderophore biosynthesis OS=Pseudomonas synxantha OX=47883; GN = VO64_0337 PE=4 SV=1
MTGIPSIVPYALPTSLDLPANLAQWHIDPERAVLLVHDMQRYFLRPLPDALRDEVVGNAARIRQWAADNGVPVAYTAQPGSMNEAQRGLLKDFWGPGMKASPTDREVVDALAPQPGDWLLTKWRYSAFFNSDLLQRLHASGRDQLILCGVYAHVGVLISSVDAYSNDIQPFLVADAIADFSKEHHWMAMEYAASRCAMVITTDEVVL

SEQ ID NO: 92804 - protein, 228 aa, Pseudomonas syringae
  REGION 1..228: note = tr|S3MBX1|S3MBX1_PSESY Isochorismatase family protein OS=Pseudomonas syringae pv. syringae SM OX=1262350; GN = PssSM_1146 PE=4 SV=1
MSERHIASAPYPWPWNGQLHAHNTALIVIDMQTDFCGVGGYVDSMGYDLALTRAPIEPIKALLAAMRPLGFTIIHTREGHRPDLSDLPANKRWRSQRIGAGIGDPGPCGKILVRGEPGWEIIDELAPLPGEIVLDKPGKGSFCATDLELILRTRGIDNLILTGITTDVCVHTTLREANDRGFECLLLEDCCGATDPGNHAAALSMVKMQGGVFGAVGHSSMLRDLLGA

SEQ ID NO: 92805 - protein, 229 aa, Pseudomonas xanthomarina
  REGION 1..229: note = tr|A0A098FPS0|A0A098FPS0_9PSED Isochorismatase hydrolase OS=Pseudomonas xanthomarina OX=271420; GN = PXNS11_190037 PE=4 SV=1
MSERFLTSEPYPWPYNGQLHPANTALVIIDMQTDFCGEGGYVDTMGYDLAAVRAPIEPIGRVLKIMREQGFHIIHTREGHRPDLSDLPANKRWRSQRIGAGIGDTGPCGRILVRGETGWELIPELQPLDGEVIIDKPGKGSFCATDLELILRTRGIENLILCGITTDVCVHTTMREANDRGFECLLLEDCCGATDRGNHLAAVHMVKMQGGVFGAVSDSVSLVALLNEH

SEQ ID NO: 92806 - protein, 207 aa, unidentified
  source 1..207: note = Pseudomonas yamanorum
  REGION 1..207: note = tr|A0A143GHN4|A0A143GHN4_9PSED Isochorismatase of siderophore biosynthesis OS=Pseudomonas yamanorum; OX = 515393 GN=AK972_2556 PE=4 SV=1
MTGIPSIVPYALPTSRDLPVNLAQWRIDPERAVLLVHDMQRYFLRPLPDALREAVVGNSARIRQWAVDHGVPVAYTAQPGSMSEEQRGLLKDFWGPGMKASPTDREVVDALTPKSGDWLLTKWRYSAFFHSDLLERMRATERDQLILCGVYAHVGVLISTVDAYSNDIQPFLVADAIADFSKEHHWMAIEYAASRCAMVITTDEVVL

SEQ ID NO: 92807 - protein, 78 aa, Pseudonocardia autotrophica
  REGION 1..78: note = tr|A0A1Y2NA56|A0A1Y2NA56_PSEAH Isochorismatase; OS = Pseudonocardia autotrophica OX=2074 GN=dhbB_1 PE=4 SV=1
MTVSPAEDRVRADVAALLGCDPATIGPDDDLLDLGLDSVRIMSLVERWRADGAPDLNFPDLAEEPVLRRWAELLRDAR

SEQ ID NO: 92808 - protein, 69 aa, Pseudonocardia sp.
  REGION 1..69: note = tr|A0A1Q8JEB1|A0A1Q8JEB1_9PSEU Isochorismatase; OS = Pseudonocardia sp. Ae356_Ps1 OX=1885032; GN = Ae356Ps1_0432 PE=4 SV=1
MVLPHTAHATYDVPPGPGPSEGVPAFLAARAAEWSLGDAIEIVADPTAVHFHPAPSVNSRTERVDTWFS

SEQ ID NO: 92809 - protein, 176 aa, unidentified
  source 1..176: note = Pseudothermotoga hypogea
  REGION 1..176: note = tr|V9NIB7|V9NIB7_9THEM Isochorismatase; OS = Pseudothermotoga hypogea OX=57487 PE=4 SV=1
MCRACFIVDRFAERFCGTGGALYFPGAESVLPPVLDLVKKYREQSLPIITTQDWHEENDAEFQIWPKHCVKDGAGAELVKALKESLSGYEKHLTVRKTRYSAFYGTNFEEIIESYGIDEVEVCGVVTHICVLFTVEELRNRGIRTIVRKDAVASYDEGFHACALKLMREVLRAEVI

SEQ ID NO: 92810 - protein, 182 aa, Psychrobacter aquaticus
  REGION 1..182: note = tr|U4T6H8|U4T6H8_9GAMM Isochorismatase; OS = Psychrobacter aquaticus CMS 56 OX=1354303 GN=M917_2502; PE = 4 SV=1
MNKQALIVVDIQNEYFPQGELALVGINEAADNAALVIASARQKGHTVIHIRHEMPSTDAPIFTPNTDGVEINEKVKPIEGETVITKHYSNSFRETALKELLDKEGIKEVTVIGAMSHMCVDATVRAAVDFGYTTTTVHDACATLDLEFNGTTVPAAQAHATIMAAIEFLYGEVVDTQTWIAL

SEQ ID NO: 92811 - protein, 201 aa, Psychrobacter arcticus
  REGION 1..201: note = tr|Q4FVP0|Q4FVP0_PSYA2 Probable isochorismatase hydrolase OS=Psychrobacter arcticus (strain DSM 17307 / 273-4) OX=259536 GN=Psyc_0044 PE=4 SV=1
MSIPSTLLGLSGGQFNEIDWSNCAIVMIDFQNEYVDGAMPLGDAGNKATANARLLLYKARNKNIPIFHVAHHGQDNDKIFNPLSSKVDIIDSLQPLDDEKTIIKMHPNAFYDTELQALITSAGKQQIIFAGFMSHMCVSSSVRAAFDLGFESFVCHDACATRDLPSVAGQVITASTVHDSAMAALQDRFAALVATDKLTNS

SEQ ID NO: 92812 - protein, 192 aa, Psychrobacter sp.
  REGION 1..192: note = tr|F5STQ6|F5STQ6_9GAMM Isochorismatase; OS = Psychrobacter sp. 1501(2011) OX=1002339; GN = HMPREF9373_2440 PE=4 SV=1
MSTTITTDKTYRIQRENCQAMIIDVQEKLSPHIYRYNDILKKTLILIQGLQVLDIPILLNEQYPEGLGRTVPEIMAVLDATKSKTIEKVTFSACDNDETWNYLAQQNRISVLVFGVEAHVCVMQTVLDLLDNGMQPVVIADAIGSRSAYDRRQAIRRMRRAGAVITTTEAILFELCRSSKDPVFKAISQLVK

SEQ ID NO: 92813 - protein, 210 aa, unidentified
  source 1..210: note = Puniceibacterium sp.
  REGION 1..210: note = tr|A0A0J5QDS3|A0A0J5QDS3_9RHOB Isochorismate hydrolase OS=Puniceibacterium sp. IMCC21224 OX=1618204; GN = IMCC21224_111855 PE=4 SV=1
MAIPRIAAYDLPKAEDLPIPRAPWRFDPSRAALLVHDMQGYFCAAYDRDAAPLAPVIANIARLAAACRVAGIPVFYTAQHGDQDRRDRGLQADLWGPGMSETPEHVDILPELAPQAGDIRLLKHRYSAFQRSNLDSLMRVRNRDQLIITGIYAHIGCLATAAEAFQRDIEPFFVADALADFSRDRHDMAVDWIAACCGVPVMTEALVSQF

SEQ ID NO: 92814 - protein, 201 aa, Pyrobaculum oguniense
  REGION 1..201: note = tr|H6Q8H9|H6Q8H9_PYROT Amidases related to nicotinamidase OS=Pyrobaculum oguniense (strain DSM 13380 / JCM 10595 / TE7) OX=698757 GN=Pogu_0959 PE=4 SV=1
MLPESVKVPRVSIVDKVSLPAKKSAVVVVDMQNDFAHPNGKLYGPAAREIIPRIASLLEKARRAGVRVVYTQDTHYPDDPVEFPIWGPHVVKGTWGWQIVDELKPREGDIVIEKMRYDAFFGTPMDHVLRMYGIQHLVVTGTVANICVLHTVASARLRLYDVVVPIDAIAALNEFDYAAALRQMDFLYKVTLTTTEGVEFV

SEQ ID NO: 92815 - protein, 197 aa, Ralstonia solanacearum
  REGION 1..197: note = tr|D8NEL1|D8NEL1_RALSL Putative isochorismatase hydrolase OS=Ralstonia solanacearum CMR15 OX=859655; GN = CMR15_mp20424 PE=4 SV=1
MSEPFQLEPAKSALLVMDYQNVLLEHYVPEDQRAGVLANTARMIVAARAAHMPVIYVMVAFRQGYPEVSARNRLFSLVKQSGAFGRGQAETAIHPAVAPLDNEPVVIKHRIGAFTGTALETLLRSNGIETLVLAGVTTAGVVLSTVRQALDLDYRVVVARDGCADPDHDLHLVLLDKVIAQHAEVVFAQRVVDALPA

SEQ ID NO: 92816 - protein, 283 aa, unidentified
  source 1..283: note = Raoultella electrica
  REGION 1..283: note = tr|A0A514EV13|A0A514EV13_9ENTR Isochorismatase; OS = Raoultella electrica OX=1259973 GN=entB PE=4 SV=1
MAIPQLQAYALPEASDIPVNKVNWAFEPSRAALLIHDMQEYFLNFWGEDSAMMAKVVANIAALREFCKRNNIPVFYTAQPKEQSDEDRALLNDMWGPGLTRSPEQQRVIAALAPDEHDTVLVKWRYSAFHRSPLEERLKESGRDQLIITGVYAHIGCMTTATDAFMRDIKPFFIADALADFSREEHLMSLKYVAGRCGRVVMTEELLPLPASKTALRALVLPLLDESDEPMDDENLIDYGLDSVRMMALAARWRKVHGDIDFVMLAKNPTIDAWWALLSREVK

SEQ ID NO: 92817 - protein, 283 aa, Raoultella ornithinolytica
  REGION 1..283: note = tr|A0A1Y6GRA4|A0A1Y6GRA4_RAOOR Isochorismatase; OS = Raoultella ornithinolytica OX=54291 GN=entB PE=4 SV=1
MAIPELQAYTLPEASDIPANKVNWAFEPSRAALLIHDMQEYFLNFWGEDSAMMAKVVANIAALRDFCKQHNIPVFYTAQPKEQSDEDRALLNDMWGPGLTRSPEQQRVIAALAPDEHDTVLVKWRYSAFHRSPLEEMLKESGRDQLIITGVYAHIGCMTTATDAFMRDIKPFFVADALADFSREEHLMSLKYVAGRCGRVVMTEELLSLPASKTALRALVLPLLDESDEPMDDENLIDYGLDSVRMMALAARWRKVHGDIDFVMLAKNPTIDAWWALLSREVK

SEQ ID NO: 92818 - protein, 145 aa, Raoultella planticola
  REGION 1..145: note = tr|A0A485AFB1|A0A485AFB1_RAOPL Isochorismatase; OS = Raoultella planticola OX=575 GN=dhbB PE=4 SV=1
MISGAPSQDSLLPDNRHAADYQQLRERLIQELNLTPQQLHEESNLIQAGLDSIRLMRWLHWFRKNGYRLTLRELYAAPTLAAWNQLMLSRSPENAEEETPPDESSWPNMTESTPLPIDASTARLPDGPHAGADAWRRGLPPVSGV

SEQ ID NO: 92819 - protein, 283 aa, Raoultella sp.
  REGION 1..283: note = tr|A0A509CMN4|A0A509CMN4_9ENTR Isochorismatase; OS = Raoultella sp. NCTC 9189 OX=2583577 GN=entB PE=4 SV=1
MAIPQLQAYALPEASDIPANKVSWAFEPSRAALLIHDMQEYFLNFWGEDSAMMAKVVANIAALRDFCKQHDIPVFYTAQPKEQSDEDRALLNDMWGPGLTRSPEQQQVIAALAPDENDTVLVKWRYSAFHRSPLEEMLKEAGRDQLIVTGVYAHIGCMTTATDAFMRDIKPFFVADALADFSREEHLMALKYVAGRCGRVVMTEELLPLPASKAALRALVLPLLDESDEPMDDENLIDYGLDSVRMMALAARWRKVHGDIDFVMLAKNPSIDAWWALLSREVK

SEQ ID NO: 92820 - protein, 246 aa, Raoultella terrigena
  REGION 1..246: note = tr|A0A3P8J427|A0A3P8J427_RAOTE Isochorismatase; OS = Raoultella terrigena OX=577 GN=entB PE=4 SV=1
MQEYFLNFWGEDSAMMAKVVANVAALRDFCKQHDIPVFYTAQPKEQSDEDRALLNDMWGPGLTRSPEQQRVIAALAPDENDTVLVKWRYSAFHRSPLEEMLKEAGRDQLIVTGVYAHIGCMTTATDAFMRDIKPFFVADALADFSREEHLMALKYVAGRCGRVVMTEELLPLPASKAALRALVLPLLDESDEPMDDENLIDYGLDSVRMMALAARWRKVHGDIDFVMLAKNPSIDAWWALLSREVK

SEQ ID NO: 92821 - protein, 230 aa, unidentified
  source 1..230: note = Reinekea forsetii
  REGION 1..230: note = tr|A0A2K8KRD7|A0A2K8KRD7_9GAMM Isochorismatase family protein OS=Reinekea forsetii OX=1336806 GN=entB; PE = 4 SV=1
MNKPLDGEFVAAKPYPYPLSINKPCLIIIDMQKDFLEPGGFGESLGNDVSLLRSVIDPLKALLKHCRSLGVPVVHTREGHKSDMSDCPPAKLNRGNTNLKIGTTGPMGRILINDSAGNQIIDELRPIEGELELLKPGKGAFYNTQLASHLKTLGCTHLLVAGVTTEVCVQTTMREANDRGFECLLLEDCTESYFPEFKRSTIEMITAQGGIVGWSTDSVTLREALERCYG

SEQ ID NO: 92822 - protein, 181 aa, Rheinheimera sp.
  REGION 1..181: note = tr|A0A486XYN1|A0A486XYN1_9GAMM Isochorismatase; OS = Rheinheimera sp. BAL341 OX=1708203 GN=BAL341_3767 PE=4; SV = 1
MLLQASQSMVLLIDMQQKLAPAIFECKEVEQAAAWVLQVALQLDVPVWATEQYPQGIGATLPALAELIPETQVLQKMHFSALKEPHIASSLACTERKQIVVLGTEAHVCVLQSVMDLLELGYQVFVVVEAVGSRTEQNKQLALSRMQQAGAQVISKEMLAFEWLECCGTDTFRQISKGWIR

SEQ ID NO: 92823 - protein, 188 aa, Rhizobium etli
  REGION 1..188: note = tr|Q2JYY4|Q2JYY4_RHIEC Probable isochorismatase protein OS=Rhizobium etli (strain CFN 42 / ATCC 51251); OX = 347834 GN=RHE_PF00312 PE=4 SV=1
MSGHETILLVIDAQESFRQRDHWDESLASAYIDRQQALIDGAAASGIPVVQIFHVDGSGPFSESSGFVRTLAPLRIAPDVTFKKSRHSALVGSGLDVWLTENGVRRIIVSGIRTEQCCETTTRHASDLGYQVDYVGEATLTFPMTDAAGRTWSAGEIRGRTELVLSGRFARISTVEQALAGRAEQLAA

SEQ ID NO: 92824 - protein, 223 aa, unidentified
  source 1..223: note = Rhizobium favelukesii
  REGION 1..223: note = tr|W6RM31|W6RM31_9RHIZ Isochorismatase hydrolase; OS = Rhizobium favelukesii OX=348824 GN=LPU83_pLPU83c_0723; PE = 4 SV=1
MMFEIKAQPFAFPTRRDQLALIVIDMQRDFAEPGGFGASLGNDVSRVAKIVPDVKRLLQGFRDAGLPVIHTMECHKPDLSDLPSAKRDRGKPSLRIGDDGPMGRILIAGEAGTAILPELAPIDGEIVIEKPGKGAFYATELGDVLKAKGISQLVFAGVTTEVCVQTTIREANDRGYECLLAEEATESYFPEFKEAAIAMIRAQGAIVGWTAHVDDILEVIGHA

SEQ ID NO: 92825 - protein, 192 aa, unidentified
  source 1..192: note = Rhizobium fredii
  REGION 1..192: note = tr|G9A9L7|G9A9L7_RHIFH Isochorismatase, hydrolase; OS = Rhizobium fredii (strain HH103) OX=1117943; GN = SFHH103_02443 PE=4 SV=1
MNPEKWIHLCIDMQRMFAEGTPWQVAWMPKVFDQVAEVAARFPDRTIFTRFVPPASPEELPGMWRAYYEKWPMMTTAELDRDLVDLVPDLKKLVPPAHILDKTTYSPWTGGRLHGALTRQDIGTLVVTGGETDVCVLAATLGAIDLGYKVLLLKDAVCSTTDQTHDASLELLGNRFSVQVEVISTERWLSSH

SEQ ID NO: 92826 - protein, 233 aa, unidentified
  source 1..233: note = Rhizobium mesoamericanum
  REGION 1..233: note = tr|K0Q2G0|K0Q2G0_9RHIZ Putative isochorismatase family protein OS=Rhizobium mesoamericanum STM3625; OX = 1211777 GN=BN77_p11049 PE=4 SV=1
MDAMAETKGHYIDADPYAWPYNGALRPDNTALIIIDMQTDFCGKGGYVDHMGYDLSLVQAPIEPIKRVLAAMRAKGYHIIHTREGHRPDLADLPANKRWRSRRINAGIGDPGPCGRILVRGEPGWEIIPELRPADGETVIDKPGKGSFCATDLELILNQKRIENIILTGITTDVCVSTTMREANDRGFECLLLEDCCGATDYGNHLAAIKMVKMQGGVFGSVSNAETLVSQLP

SEQ ID NO: 92827 - protein, 208 aa, Rhizobium radiobacter
  REGION 1..208: note = tr|A0A083ZMR8|A0A083ZMR8_RHIRD Putative isochorismatase OS=Rhizobium radiobacter OX=358; GN = SY94_5273 PE=4 SV=1
MIEFSAEGDWRHLCVDMQRVFAEDTPWHVEWMDRISEEVEVVVASDPARCIFTCFVPPRSVGEARGAWRAYYEKWPMMTQQALAPELIEVIPSLSRYIPPARIFRKSVYSPWQHGGLGEILRQEQVSTLVITGGETDVCVLATVLGAIDQGFYVILVEDALCSGRDATHDAAMKLLSGRFSTQLQVCDTATLLQALPPKKGARLPEIS

SEQ ID NO: 92828 - protein, 229 aa, Rhizobium sp.
  REGION 1..229: note = tr|U4Q4E4|U4Q4E4_9RHIZ Putative Isochorismatase family protein OS=Rhizobium sp. IRBG74 OX=424182; GN = BN877_II1107 PE=4 SV=1
MSKLEVLTPANSQIIFIDQQPQMAFGVQSIDRQTLKNNVVGLAKAAKIFNIPTTITTVETESFSGNTFPELLAVFPENDILERTSMNSWDDQNVRDALAKNAANGRKKIVVSGLWTEVCNTTFALSALHDVADYEIYMVADASGGTSVDAHKYAMDRMVQAGVIPVTWQQVLLEWQRDWARKETYDAVTSLVKEHSGAYGMGIDYAVTHVHGGAERVKHGKRIGPNPAK

SEQ ID NO: 92829 - protein, 181 aa, Rhodobacter capsulatus
  REGION 1..181: note = tr|D5AR52|D5AR52_RHOCB Isochorismatase; OS = Rhodobacter capsulatus (strain ATCC BAA-309 / NBRC 16581 / SB1003) OX=272942 GN=entB PE=4 SV=1
MGKTALLIIDMQSEMQARLDAGRAAVNREAGAAIAALAGACRAKGVAVVHVRHHDAGPASPLHPDAPGAQPMPCDAALPGEAVFLKSTSSAFASTDLAAHLRGQGIDRLIITGAVLGFCVTSTVRAAADLGFAVILPRDACLGFDLPGMGLSAEEIARVSFGLLGADFATLTTTPEVIASL

SEQ ID NO: 92830 - protein, 219 aa, unidentified
  source 1..219: note = Rhodobacteraceae bacterium
  REGION 1..219: note = tr|A0A418SFN8|A0A418SFN8_9RHOB Isochorismatase; OS = Rhodobacteraceae bacterium Lw-13e OX=1537215 GN=dhbB; PE = 4 SV=1
MALPTIPDYALPERLPTPRAPFALDRNRAALLVHDMQRYFCAPYGADAATRNNGPLRRATANIARLLDAARRVGVPVFYTAQKGDQFRPDRGLQADLWGPGMSATPEHEDILPELAPSEGDITLHKHRYSAFQRSNLDQLLRARGRDQLMITGIYAHIGCLCTATEAFQRDIEPFFVADALADFGPDQHAMALNWVAATCGVPIDTDDTLATLTAGEPA

SEQ ID NO: 92831 - protein, 213 aa, Rhodococcus coprophilus
  REGION 1..213: note = tr|A0A2X4TZ46|A0A2X4TZ46_9NOCA Isochorismatase; OS = Rhodococcus coprophilus OX=38310 GN=dhbB PE=4 SV=1
MALPKSVSYSLPDEQPANVVSWSVDPDRAVLLVHDMQEYFVRSFDRTADPLATVVPHIDQLRNAAHEVGVPVVYTAQPGDQDPSDRALLSDFWGPGLSEDPNETSIIAELAPHAGDTLLTKWRYSAFIRTDLLERMRAWGRDQLIVTGVYAHIGCLTTALDGFMNDIQVFFVSDGTADFSQREHIDALNYVASRCAVVLPTDDVVGALSSVRA

SEQ ID NO: 92832 - protein, 215 aa, Rhodococcus erythropolis
  REGION 1..215: note = tr|C0ZYH2|C0ZYH2_RHOE4 Isochorismatase; OS = Rhodococcus erythropolis (strain PR4 / NBRC 100887); OX = 234621 GN=RER_26990 PE=4 SV=1
MALPTAVRYEMPTEFPQNRVDWTLDPSRAVLLLHDMQEYFVNAYDRSVDPLQTVVPNIDRLRSSARAAGIPIVYTAQPGDQDPEERALLSDFWGPGLKADPAHTDVIAELAPHPDDVMLTKWRYSAFIKTDLRERLRESGRDQLIITGIYAHIGCLTTALDGFMQDVQIFFVGDAVADFSLGEHVGALEYAAGRCASVTRTDDLVKAMSAETVSA

SEQ ID NO: 92833 - protein, 208 aa, Rhodococcus fascians
  REGION 1..208: note = tr|A0A161GGF8|A0A161GGF8_RHOFA Putative isochorismatase OS=Rhodococcus fascians D188 OX=1051973; GN = phzD PE=4 SV=1
MATFSVEVEKYAVETLRDCVGGPEWELRPERAALLVHDMQPYYLNVLHSSVRARVAAEASAVLACARSAGVPILASGPRAAEAIEQRGLLGPMWGLGPSADDVAVTESDFVPIAKRSYSAFYASDLEVELRRRGRDQLVIVGVFASAGILATTFDAFARDIQCFVGIESVADHTAHQHRTALNLITSLTGVVTSSANLLHDLRCGPLD

SEQ ID NO: 92834 - protein, 228 aa, Rhodococcus gordoniae
  REGION 1..228: note = tr|A0A379M417|A0A379M417_9NOCA Isochorismatase; OS = Rhodococcus gordoniae OX=223392 GN=dhbB PE=4 SV=1
MAIPSIDPYELPTGDEIPAARVDWTLDASRCALLVHDMQKYFIDAYRCDAEPLATVVPNIVRLREACLAAGIPVVYTMQPGDQHPSRRGILADFWGVGLSTGRDTEVIDELTPGPDDIQVTKWRYSAFQRTDFRQLLAHNGRDQLIVTGVYAHMGCMLSAADAFMSDVAPFMALDATADFSRDEHLTALQYVAKRVGRVETTNALIESIVASARCRDREAEELTASLR

SEQ ID NO: 92835 - protein, 215 aa, Rhodococcus jostii
  REGION 1..215: note = tr|Q0SEB2|Q0SEB2_RHOJR Isochorismatase; OS = Rhodococcus jostii (strain RHA1) OX=101510; GN = RHA1_ro02318 PE=4 SV=1
MAIPPISTYTIPEIHEVPESKVSWRLDPRRSALLVHDMQNYFIDAYDVRAEPMSTAMANMVRIRELCSEAGIPVIYTMQPGDQHPSRRGILADFWGPGLTSGRDTEVVEPLAPREGDIQVTKWRYSAFQRTDLRQLLGHHGRDQLIVTGVYAHMGCMLSAAEAFMSDVQPFLVSDATADFSRDEHLMALTYAAKRCGSVTTTDALVSALSPLEVG

SEQ ID NO: 92836 - protein, 215 aa, Rhodococcus opacus
  REGION 1..215: note = tr|C1B0T3|C1B0T3_RHOOB Isochorismatase; OS = Rhodococcus opacus (strain B4) OX=632772 GN=ROP_20360; PE = 4 SV=1
MAIPPISTYTIPEIHEVPESKVSWRLDPRRSALLVHDMQNYFIDAYDVRAEPMSTAMANMVRIRELCSEAGIPVIYTMQPGDQHPSRRGILADFWGPGLTSGRDTEVVEPLAPREGDIQVTKWRYSAFQRTDLRQLLGHHGRDQLIVTGVYTHMGCMLSAAEAFMSDVQPFLVSDATADFSRDEHLMALTYAAKRCGSVTTTDALVSALSPLEVG

SEQ ID NO: 92837 - protein, 217 aa, Rhodococcus rhodochrous
  REGION 1..217: note = tr|W4A0M0|W4A0M0_RHORH Isochorismatase; OS = Rhodococcus rhodochrous ATCC 21198 OX=1429046; GN = RR21198_4490 PE=4 SV=1
MALPKSVSYPLPTDLPANTVDWTIDPGRAVLLVHDMQEYFVRAFDRAADPLATVVPNIDAIRRSAYEAGIPVVYTAQPGDQDPAERALLTDFWGPGLADDPALTSVVADLAPREDDVQLTKWRYSAFIRTDLRERMRAWGRDQLVVTGVYAHIGCLSTALDGFMQDVQVFVVADGVADFSRREHTEALHYLAARCAAVVPAADAVRRLRTRVLSVSG

SEQ ID NO: 92838 - protein, 217 aa, Rhodococcus ruber
  REGION 1..217: note = tr|A0A098BQ21|A0A098BQ21_9NOCA 2,3-dihydro-2,3-dihydroxybenzoate synthetase, isochorismatase OS=Rhodococcus ruber OX=1830 GN=dhbB PE=4; SV = 1
MALPKSVSYPMPTDLPENTVDWTIDPRRAVLLVHDMQEYFVRAFDRTADPLATVVPNIDTIRQSAYEAGIPVVYTAQPGDQDPAERALLTDFWGPGLADDPALTSVVAELAPREDDVQLTKWRYSAFIRTDLRERMHAWGRDQLVVTGVYAHIGCLSTALDGFMRDVQVFVVADGVADFSRREHTEALQYLAARCAAVVPAADAVRRLRTGALSVSG

SEQ ID NO: 92839 - protein, 76 aa, Rhodococcus sp.
  REGION 1..76: note = tr|A0A0D8I0G3|A0A0D8I0G3_9NOCA Isochorismatase; OS = Rhodococcus sp. AD45 OX=103808 GN=dhbB_1 PE=4 SV=1
MTTAFTRERIISDLAEVLDLPVDELTEDVSLIDLGLDSVRLMSLVERWRFEGAAIDFVDLASDPQVGAWLEVMGAE

SEQ ID NO: 92840 - protein, 200 aa, Rhodoferax antarcticus
  REGION 1..200: note = tr|A0A1Q8YB68|A0A1Q8YB68_9BURK Isochorismatase; OS = Rhodoferax antarcticus ANT.BR OX=1111071 GN=BLL52_3390; PE = 4 SV=1
MLLEADTSQLVLVDYQARLMPAIFEAPLVLANAVRLAKMARLLNVPVIGTEQNPSKLGENAPEVRALCQRTLAKMHFGGVEEGLGEWLRPPVKPPAGNARSLPKHLQKPSNTPSERNTIVIAGCEAHVCLLQTALQLLEDEFDVWVVTDACSSRTERNRDAAFDRLAGAGAELVTTEMVAFEWLRSAEHPQFKAVLPLIK

SEQ ID NO: 92841 - protein, 210 aa, Rhodomicrobium vannielii
  REGION 1..210: note = tr|E3I7N3|E3I7N3_RHOVT Isochorismatase; OS = Rhodomicrobium vannielii (strain ATCC 17100 / ATH 3.1.1 / DSM 162 / LMG 4299) OX=648757 GN=Rvan_0363 PE=4 SV=1
MILENKAGWVLEPGRCALLIHDMQRHYLDALPDAATRADLVGKVAGLRALCAEWGVPVFASMVPEAHGLQERGLMSELWGRGPRGDGAMLDQALLGNDSRIRLITKRSYSAFYGTDLEVMLRRLGRDSLVITGLYTSIGCFSTALEAFARDIRAFVVADATADMSAADHAAGLRNAARLCARVVDSGDVRAALAPHSLRPVDRRAAIDVC

SEQ ID NO: 92842 - protein, 189 aa, Rhodospirillum rubrum
  REGION 1..189: note = tr|Q2RQT1|Q2RQT1_RHORT Isochorismatase hydrolase; OS = Rhodospirillum rubrum (strain ATCC 11170 / ATH 1.1.1 / DSM 467 / LMG 4362 / NCIB 8255 / S1) OX=269796 GN=Rru_A271 7 PE=4 SV=1
MSFATPSLIDAARSVLIVVDIQERLCPVMTDPRGVLFNGARLVRGARRLGVPVVVTEQYPKGLGPTMHDILSELGDGASSAVIEKTHFSAAAEPLVRQHLESLGRRQAVICGIEAHVCVTQTAIDLRAAGWEVFVVSDACSSRRPESLTAALTRFPAAGVVPVITEMVLFEWLADKNNDGFKDIMSLVR

SEQ ID NO: 92843 - protein, 83 aa, Rhodovulum sulfidophilum
  REGION 1..83: note = tr|A0A0D6B996|A0A0D6B996_RHOSU 2,3-dihydro-2,3-dihydroxybenzoate synthetase OS=Rhodovulum sulfidophilum OX=35806 GN=NHU_04518 PE=4 SV=1
MTLTTTSTAPDRDWLSARLNSLLEDEGPIDPTESLIYYGLDSLRVMKLAAELNAHGIHVGFEDLAREPTLDAWTALIDARRDG

SEQ ID NO: 92844 - protein, 202 aa, Ricinus communis
  REGION 1..202: note = tr|B9SY42|B9SY42_RICCO Isochorismatase, putative; OS = Ricinus communis OX=3988 GN=RCOM_0986590 PE=4 SV=1
MATRCPSSYKKYEIRRRDPDPKFSVLLVVDAQNYFSSMVKPILPNLLQTIDLCRRASIPVFFTRHRHKSPADYGMLGEWWNNDLIIDGTVESQLVPEIKRLVLGKDHEVVEKNTYSAFTNTRLHERLLEMGVEEVIVTGVMTNLCCETTARDAFVRGFRVFFSTDATATSDLELHEATLKNLAYGFAYMVDCQRLENGLFRN

SEQ ID NO: 92845 - protein, 200 aa, unidentified
  source 1..200: note = Roseimaritima ulvae
  REGION 1..200: note = tr|A0A5B9QWY0|A0A5B9QWY0_9PLAN Isochorismatase; OS = Roseimaritima ulvae OX=980254 GN=entB PE=4 SV=1
MAKPKSATGSLHGSAPDVGDVALLLIDVINDLEFEGGDKLLQLAKPMAERLAALRDQFRNAELPIIYANDNFGRWKSDFRVQVDHCLHGGVRGKPIVEMLQPLDEDYFVLKPKHSAFYATTLDVLLKHLEVKRLVITGMATDICVLFTANDAYMRDFQVTIPADCVAANSQPQSDAALRLMQRVLKADIRESTALLNKIG

SEQ ID NO: 92846 - protein, 177 aa, Roseobacter sp.
  REGION 1..177: note = tr|B7RSD4|B7RSD4_9RHOB Isochorismatase; OS = Roseobacter sp. GAI101 OX=391589 GN=entB PE=4 SV=1
MQTWYVDRYEEPNGLLTNIEAIREVAERAGMPVIFAAADPVQHVAERGIAADLWGPGIGVVTDARCEDDEMHPRLTPKPEDFIIRKRKYSAFFQTDLEALLRRLNRSQIVLTGNYANHGCTVTAIDAYMRNFKVFFVADALGAFDAASHEHALRTVTDICGYVTLTDRVVPQIISTK

SEQ ID NO: 92847 - protein, 87 aa, Roseomonas cervicalis
  REGION 1..87: note = tr|D5RMA8|D5RMA8_9PROT Phosphopantetheine attachment domain protein OS=Roseomonas cervicalis ATCC 49957; OX = 525371 GN=entB2 PE=4 SV=1
MADAAPPPLTRARMRADIAQALRLAPGEFTDDEDLADLGLDSLRAIDLVTRWAEAGLPLEFSELSERLSVDAWWAVAERALARRAHG

SEQ ID NO: 92848 - protein, 214 aa, Roseomonas gilardii
  REGION 1..214: note = tr|A0A379N5A9|A0A379N5A9_9PROT Isochorismatase; OS = Roseomonas gilardii subsp. rosea OX=243956 GN=dhbB_1; PE = 4 SV=1
MSSTKGLPRIPAYPLPRAEELPAARAPWRLERDRAALLVHDMQRYFVGAFTPDEPPIEPVLANIHALAAKARLAGIPVFYTAQEGDQDRRDRGLQADLWGKGMSWSQDHQPILDDLAPQPHDFVLVKHRYSAFQRSNLETLMRARGRDQIIVCGIYAHIGCLLTAAEAFMRDIEPFYAADAVADFSREKHDMALRYVADVCGVPMTTKQILEVL

SEQ ID NO: 92849 - protein, 84 aa, Roseomonas mucosa
  REGION 1..84: note = tr|A0A1S8D616|A0A1S8D616_9PROT Isochorismatase; OS = Roseomonas mucosa OX=207340 GN=dhbB_2 PE=4 SV=1
MSHAPLTREGMRADIARLLHEDPSEIGDDDSLIDLGLDSMRAMNLLLLWSERGLSLDFGEFAEELTLNTWWAIVERRQKAQAGG

SEQ ID NO: 92850 - protein, 214 aa, Roseomonas sp.
  REGION 1..214: note = tr|A0A1Q2YZ09|A0A1Q2YZ09_9PROT Isochorismatase; OS = Roseomonas sp. TAS13 OX=1926319 GN=dhbB_1 PE=4 SV=1
MSSTKGLPRIPAYPLPRAEELPAPRAPWRLERDRAALLVHDMQRYFVGAFTPDEPPIELVLANIHALAAKARRAGIPVFYTAQEGDQDRRDRGLQADLWGRGMSWSQDHQPILDELAPQPDDFVLVKHRYSAFQRSNLETLMRARGRDQIIVCGIYAHIGCLLTAAEAFMRDIEPFYAADAVADFSREKHDMALRYVADVCGVPMTTTQILEVL

SEQ ID NO: 92851 - protein, 178 aa, unidentified
  source 1..178: note = Roseovarius gaetbuli
  REGION 1..178: note = tr|A0A1X6Y3N0|A0A1X6Y3N0_9RHOB Putative isochorismatase OS=Roseovarius gaetbuli OX=1356575 GN=phzD; PE = 4 SV=1
MLTIDARTSHLLVIDFQARLMPAIHDSAPVVQNAGRLLSAARRLELPISYTEQNPKGLGTTLPELAPEPGEEVLHKMTFDACRTPEVTAHLADNTALVVMGCEAHVCVLQTVLGLLSDGRRVYVVADAIGSRMEENRRAALGRMAHHGAEIVTTEMVIFEWMTTAEHPEFRDIVKLVK

SEQ ID NO: 92852 - protein, 192 aa, Roseovarius mucosus
  REGION 1..192: note = tr|A0A1V0RL96|A0A1V0RL96_9RHOB Vibriobactin-specific isochorismatase OS=Roseovarius mucosus OX=215743 GN=vibB; PE = 4 SV=1
MNTTFVDDIRGTIMLIRAADSALVIIDMQERLVPAMQAPARTIRNARTLMACAQEMAVPVVMTEQYPSGLGRTVPDLKPGPDAVVLSKMHFSCMEDTHFAAHFRALGRKQAVLAGMEAHVCVLQTAASLIEEGFEVFVVSDATASRTLESEHACIARLSAAGAGIATTEMVVFEWLGQAGTPAFKKLLPLIK

SEQ ID NO: 92853 - protein, 192 aa, Roseovarius sp.; identical to SEQ ID NO: 92852
  REGION 1..192: note = tr|A0A5E8AV33|A0A5E8AV33_9RHOB Vibriobactin-specific isochorismatase OS=Roseovarius sp. EC-HK134 OX=2038394; GN = vibB PE=4 SV=1

SEQ ID NO: 92854 - protein, 238 aa, Rothia dentocariosa
  REGION 1..238: note = tr|E3H114|E3H114_ROTDC Isochorismatase OS=Rothia dentocariosa (strain ATCC 17931 / CDC X599 / XDIA); OX = 762948 GN=entB PE=4 SV=1
MAGGDHMALPKIAPYSYREQEHQNRVNWRVDPARSALLVHDMQRYFVRAFELERDGQPLPDAQINIAIANIRRLLDAAHAANIPVYYTAQPPRQNPADRRLLTDFWGDGLQDDENARILDELAPTEADTVLTKWRYSAFARSPLEEQLKDLGRDQLIIGGIYAHIGCLTTALEAFMRDIQPFMVADALADFTEKEHRMACEYASGRCSRVLNTAEVLEHINASDLVTADEPELRKVCV

SEQ ID NO: 92855 - protein, 241 aa, unidentified
  source 1..241: note = Rothia kristinae
  REGION 1..241: note = tr|A0A147E8I8|A0A147E8I8_9MICC Isochorismatase; OS = Rothia kristinae OX=37923 GN=dhbB PE=4 SV=1
MPLPTIPAYTLPQDRPAAAVDWTADPTRSALLVHDMQSYFIDAFQSGEDGAEGEAGEGSAQGEAAPVGAAQIDVAVGRIAALLETARKAGIPIVYTAQPPRQDLADRALLTDFWGTGLSTDAQARIIDELAPAEGDIVLPKWRYSAFMRSTLREQLLARGRDQLAITGVYAHIGCLATALDAFMLDVQAFLVADALADFTREDHVRALDYAAGRCARVQDTAEILASWQDAQDEQGQGVSR

SEQ ID NO: 92856 - protein, 192 aa, unidentified
  source 1..192: note = Rubripirellula obstinata
  REGION 1..192: note = tr|A0A5B1CSV2|A0A5B1CSV2_9PLAN Vibriobactin-specific isochorismatase OS=Rubripirellula obstinata OX=406547; GN = vibB PE=4 SV=1
MPHVASVHRLDSNRSGLLVVDLQERLVPVIPSGDQVVRQTQRLLKAADMLQVPSAATVQYPKGLGNLVAPLDQWFSHDKNSPEEKLEFSSAVCRQSLDAWTQAGRDQIVVTGIETHVCILQTVLDLMAEGCFAYVVAEAVAARHGRDHETAMDRMRDAGATIITAESVMFEWLGTADHPQFKEISKLVKAGV

SEQ ID NO: 92857 - protein, 185 aa, Rubrivivax gelatinosus
  REGION 1..185: note = tr|I0HME8|I0HME8_RUBGI Putative isochorismatase hydrolase family protein OS=Rubrivivax gelatinosus (strain NBRC 100245 / IL144) OX=983917 GN=RGE_08440 PE=4 SV=1
MSTAVLLIDVQQSFTARPYWDPAAAPGFLARVNALVAGATERGLPVVRILHTDGPKTADNPFALESGLVRPLDGLAPYDAAASFLKERHSALVGTGLTVWLHQQGIRRLIVAGIRTEQCCETTTRHASDEGWEVDYVTEATLTFAMTTPAGRTLSPAELYERTETVLAGRFATICSVEQALQRAA

SEQ ID NO: 92858 - protein, 178 aa, unidentified
  source 1..178: note = Ruminiclostridium cellobioparum
  REGION 1..178: note = tr|S0FHN2|S0FHN2_RUMCE Isochorismatase hydrolase; OS = Ruminiclostridium cellobioparum subsp. termitidis CT1112 OX=1195236 GN=CTER_3244 PE=4 SV=1
MKETALLIIDVQVAMFSYENEYPYNGDAVLNNIREMLFKARENNIPVIFVQHTAADEYQKDTATWQICPEIAPLEQEYVVQKTQRDSFYNTNLKEILDGLGIKKLIVAGMQTEFCVDTTCRIAYSAGYELTLVKDAHTTFDSPVLPAEQIISHHNGVLKGIAGLKTTKEILEQIARID

SEQ ID NO: 92859 - protein, 221 aa, Saccharomonospora viridis
  REGION 1..221: note = tr|C7MVZ8|C7MVZ8_SACVD Isochorismate hydrolase; OS = Saccharomonospora viridis (strain ATCC 15386 / DSM 43017 / JCM 3036 / NBRC 12207 / P101) OX=471857; GN = Svir_20850 PE =4 SV=1
MSLPRIQPYPLPTAAERPAGRVAWRLDPNRAALLVHDMQRYFLAPYAGEPIPEVVDNIATLATAFRDHGAPVFYTAQPGHQPPAERGLLTEFWGDGIGAVIDTDPQAADIIPELAPEPADTVLVKWRYSAFQRSAFAEQLAELGRDQLVITGVYAHIGCQTTAVEAFMRDIRPFLVSDAVADFSREHHDQACAYVAQRCGVVTTTADAVSTLSAPIHTGVM

SEQ ID NO: 92860 - protein, 319 aa, Saccharophagus degradans
  REGION 1..319: note = tr|Q21F76|Q21F76_SACD2 Isochorismatase; OS = Saccharophagus degradans (strain 2-40 / ATCC 43961 / DSM 17024) OX=203122 GN=Sde_3398 PE=4 SV=1
MAIPKINNYSLTGQVKATNEEYGNRVSWPLDANKAVLLVHDMQKYFVEFYDQQGEPMRSLVQNIQTIVAQCKAAGIPIVYTAQPPHQAPEERALLTDFWGAGLTSENNQHAIVESLKPAADDLVFTKWRYSAFQRTPLHEYMAENNKDQLWIVGVYAHIGILSTALEAFMTDIKAFVVADAVADFSSTEHSMALHYISRRCGRVVALQDIHVATEENKAALASKGANTPQTGSEILNNIAVSVSTALGMAVEELDQDENLFEMGLDSIRLMAIVDVLRENNIEIGFAELAEQPTLKAWAAMLGALPVISAQENRLVTNE

SEQ ID NO: 92861 - protein, 132 aa, Saccharopolyspora erythraea
  REGION 1..132: note = tr|A4FGE8|A4FGE8_SACEN Isochorismatase (2,3 dihydro-2,3 dihydroxybenzoate synthase); OS = Saccharopolyspora erythraea (strain ATCC 11635 / DSM 40517 / JCM 4748 / NBRC 1 3426 / NCIMB 8594 / NRRL 2338); OX = 405948 GN=dhbB
MALPAIAPYSVPRQEELPANRVDWRPAADRAVLLVHDMERHFVNAFTPGREPLTEVVANIRTLRASAHAAGVPVVYCAQPSGRPGATPVRCAELAPDRSRRRQVTSTKAPAETGRSRSRARSAGAPARPAAS

SEQ ID NO: 92862 - protein, 214 aa, Saccharothrix espanaensis
  REGION 1..214: note = tr|K0JZB6|K0JZB6_SACES Isochorismatase; OS = Saccharothrix espanaensis (strain ATCC 51144 / DSM 44229 / JCM 9112 / NBRC 15066 / NRRL 15764) OX=1179773; GN = BN6_27020 PE=4SV=1
MGLPTIEPYPMPTEADLPVNRVKWTCEPSRAVLLVHDMQNYFLRAFSPDASPVVELVRNIRALRDTCHALGVPVVYSAQPGGQSTEQRGLQLDMWGTGIGPDPVDAEIHAALEPGESDVRLTKWRYNAFHRTDLRSLLDTTGRDQLVVTGIYAHIGCLMTAADAFMQDIQAFFVADAVADFTPDDHHMAVRYAAGRCAVTTTTTRLITELNGAS

SEQ ID NO: 92863 - protein, 230 aa, Salinisphaera shabanensis
  REGION 1..230: note = tr|U2G3P1|U2G3P1_9GAMM Isochorismatase protein; OS = Salinisphaera shabanensis E1L3A OX=1033802; GN = SSPSH_000080 PE=4 SV=1
MNPAFQSLASACPYAWPVTGDWRVADTALLVIDMQRDFLDPDGYFAALGENASELREAVGPAAKVLALARRLGMRVIHTREGHRPDLADLNDTKRARALAMGAPIGGPGPLGRLLVRGEPGWDSIAEMAPVDDEIVIDKCGNGAFHATDLDQVLRANGIRNLWLVGVTTDVCVSSTMREANDRGYDVLLISDACCAATSALHAATLAGIEREGGVFGAHISSSALLEAVR

SEQ ID NO: 92864 - protein, 224 aa, Salinisphaera sp.
  REGION 1..224: note = tr|A0A2Z3J2M9|A0A2Z3J2M9_9GAMM Isochorismatase; OS = Salinisphaera sp. LB1 OX=2183911 GN=SALB1_0448 PE=4 SV=1
MSQALLVIDMQRDFCEAGGYAAACGLDIALLRQPIEPTGRLIAAARQNGIAVIYTREGHRPDLADCHPAKLARSAACGASIGAHASLGRHLVRGEPGHDVVPELAPAAGDPIVDKPGYGAFYQTDLELLLQARGTTHLYVTGVTTDICVHSTLREAIDRGYECVTVADACAAADVGIHSAALGLIEGPEGPILGRVRDTATVLADWGRGQPAAASNNANQGALT

SEQ ID NO: 92865 - protein, 285 aa, unidentified
  source 1..285: note = Salmonella agona
  REGION 1..285: note = tr|B5EYI8|B5EYI8_SALA4 Isochorismatase OS=Salmonella agona (strain SL483) OX=454166 GN=entB PE=4 SV=1
MAIPKLQSYALPTALDIPTNKVNWAFEPERAALLIHDMQDYFVSFWGRNCPMMDQVIANIAALRQYCKEHHIPVYYTAQPKEQSDEDRALLNDMWGPGLTRSPEQQKVVEALTPDEADTVLVKWRYSAFHRSPLEQMLKDTGRNQLIITGVYAHIGCMTTATDAFMRDIKPFMVADALADFSREEHLMALNYVAGRSGRVVMTESLLPTPVPASKAALRALILPLLDETDEPLDDENLIDYGLDSVLMMGLAARWRKVHGDIDFVMLAKNPTIDAWWALLSRGVE

SEQ ID NO: 92866 - protein, 285 aa, Salmonella bongori
  REGION 1..285: note = tr|A0A3S4E7H0|A0A3S4E7H0_SALBN Isochorismatase; OS = Salmonella bongori OX=54736 GN=entB PE=4 SV=1
MAIPKLQSYALPTAQDIPTNKVNWAFEPERAALLIHDMQDYFVSFWGRDCPMMDQVIANIAALRQYCKEHHIPVYYTAQPKEQSDEDRALLNDMWGPGLTRSPEQQKVVEALTPDEADTVLVKWRYSAFHRSPLEQMLKDTGRNQLIITGVYAHIGCMTTATDAFMRDIKPFMVADALADFSREEHLMALKYVAGRSGRVVMTESLLPTPVPASKAALRAMILPLLDESDEPVDDENLIDYGLDSVRMMGLAARWRKVHGDIDFVMLAKNPTIDAWWALLSREVE

SEQ ID NO: 92867 - protein, 285 aa, unidentified
  source 1..285: note = Salmonella diarizonae
  REGION 1..285: note = tr|A0A379U227|A0A379U227_SALDZ Isochorismatase; OS = Salmonella diarizonae OX=59204 GN=entB PE=4 SV=1
MAIPKLQSYALPTALDIPTNKVSWTFEPERAALLIHDMQEYFVSFWGRNCPMMDLVIANIAALRQYCKEHHIPVYYTAQPKEQSDEDRALLNDMWGPGLTRSPDQQKVVEALTPDEADTVLVKWRYSAFHRSPLEQMLKDTGRNQLIITGVYAHIGCMTTATDAFMRDIKPFMVADALADFSREEHLMALNYVAGRSGRVVMTESLLPAPVPASKTALRALILPLLDETDEPLDDENLIDYGLDSVRMMGLAARWRKVHGDIDFVMLAKNPTIDAWWALLSREVQ

SEQ ID NO: 92868 - protein, 191 aa, Salmonella enterica
  REGION 1..191: note = tr|A0A379UM85|A0A379UM85_SALET Isochorismatase; OS = Salmonella enterica I OX=59201 GN=entB_2 PE=4 SV=1
MGPGLTRSPEQQKVVEALTPDEADTVLVKWRYSAFHRSPLEQMLKDTGRNQLIITGVYAHIGCMTTATDAFMRDIKPFMVADALADFSREEHLMALNYVAGRSGRVVMTESLLPTPVPASKAALRALILPLLDETDEPLDDENLIDYGLDSVRMMGLAARWRKVHGDIDFVMLAKNPTIDAWWALLSRGVE

SEQ ID NO: 92869 - protein, 285 aa, unidentified
  source 1..285: note = Salmonella houtenae
  REGION 1..285: note = tr|A0A3Y1WYD4|A0A3Y1WYD4_SALHO Isochorismatase; OS = Salmonella houtenae OX=59205 GN=entB PE=4 SV=1
MAIPKLQSYALPTALDIPTNKVSWAFEPERAALLIHDMQDYFVSFWGRNCPMMEQVIANIAALRQYCKEQHIPVYYTAQPKEQSDEDRALLNDMWGPGLTRSPEQQKVVEALTPDEADTVLVKWRYSAFHRSPLEQMLKDTGRNQLIITGVYAHIGCMTTATDAFMRDIKPFMVADALADFSREEHLMALNYVAGRSGRVVMTESLLPAPVPASKTALRALILPLLDETDEPLDDENLIDYGLDSVRMMGLAARWRKVHGDIDFVMLAKNPTIDAWWALLSREVQ

SEQ ID NO: 92870 - protein, 285 aa, unidentified
  source 1..285: note = Salmonella newport
  REGION 1..285: note = tr|A0A0H3BUA4|A0A0H3BUA4_SALNS Isochorismatase; OS = Salmonella newport (strain SL254) OX=423368 GN=entB; PE = 4 SV=1
MAIPKLQSYALPTALDIPTNKVNWAFEPERAALLIHDMQDYFVSFWGRNCPMMDQVIANIAALRQYCKEHHIPVYYTAQPKEQSDEDRALLNDMWGPGLTRSPEQQKVVEALTPDEADTVLVKWRYSAFHRSPLEQMLKDTGRNQLIITGVYAHIGCMTTATDAFMRDIKPFMVADALADFSREEHLMALNYVAGRSGRVVMTESLLPTPVPASKAALRALILPLLDETDEPLDDENLIDYGLDSVRMMGLAARWRKVHGDIDFVMLAKNPTIDAWWALLSRGVE

SEQ ID NO: 92871 - protein, 285 aa, unidentified
  source 1..285: note = Salmonella schwarzengrund
  REGION 1..285: note = tr|A0A0N1QXT5|A0A0N1QXT5_SALSV Isochorismatase; OS = Salmonella schwarzengrund (strain CVM19633) OX=439843; GN = entB PE=4 SV=1
MAIPKLQSYALPTALDIPTNKVNWAFEPERAALLIHDMQDYFVSFWGRNCPMMDQVIANITALRQYCKEHHIPVYYTAQPKEQSDEDRALLNDMWGPGLTRSPEQQKVVEALTPDEADTVLVKWRYSAFHRSPLEQMLKDTGRNQLIITGVYAHIGCMTTATDAFMRDIKPFMVADALADFSREEHLMALNYVAGRSGRVVMTESLLPTPVPASKAALRALILPLLDETDEPLDDENLIDYGLDSVRMMGLAARWRKVHGDIDFVMLAKNPTIDAWWALLSRGVE

SEQ ID NO: 92872 - protein, 285 aa, Salmonella sp.; identical to SEQ ID NO: 92870
  REGION 1..285: note = tr|A0A509CSG3|A0A509CSG3_9ENTR Isochorismatase; OS = Salmonella sp. NCTC 11881 OX=2583579 GN=entB PE=4 SV=1

SEQ ID NO: 92873 - protein, 285 aa, unidentified; identical to SEQ ID NO: 92870
  source 1..285: note = Salmonella typhimurium
  REGION 1..285: note = tr|Q8ZR31|Q8ZR31_SALTY 2,3-dihydro-2,3-dihydroxybenzoate synthetase, isochorismatase OS=Salmonella typhimurium (strain LT2 / SGSC1412 / ATCC 700720) OX=99287 GN=entBPE=4 SV=1

SEQ ID NO: 92874 - protein, 67 aa, unidentified
  source 1..67: note = Schaalia cardiffensis
  REGION 1..67: note = tr|N6X4G2|N6X4G2_9ACTO Isochorismatase OS=Schaalia cardiffensis F0333 OX=888050 GN=HMPREF9004_0851 PE=4 SV=1
MSWHRKSTTPFTIDLRELIVLSELSLSPPTQQDKSSPPGHRNPFLHPQHAYGQSRKRSLCSAPLHPA

SEQ ID NO: 92875 - protein, 204 aa, Schistosoma mansoni
  REGION 1..204: note = tr|G4LYG9|G4LYG9_SCHMA Isochorismatase family protein, putative OS=Schistosoma mansoni OX=6183; GN = Smp_000630 PE=4 SV=1
MSGISRVGKLLLPRTALLLCDIQEKFRPTISHFDAIVETSSRMLTAARMLGMRILVTEMYPKGLGPTVKELGDLNGIPIISKRSFTMLTDEVANILELRKQIDSVLLCGIETHVCVQSTALDLIERGIQVHCIVDAVSSRNMVDRMFGFQRMSQSGVYLTTCESALLTILCGSDHPQFRDIQKIILKPSPDSGLLTGFNTLKIS

SEQ ID NO: 92876 - protein, 243 aa, Segniliparus rotundus
  REGION 1..243: note = tr|D6ZCJ1|D6ZCJ1_SEGRD Isochorismatase; OS = Segniliparus rotundus (strain ATCC BAA-972 / CDC 1076 / CIP 108378 / DSM 44985 / JCM 13578) OX=640132 GN=Srot_0551; PE = 4 SV= 1
MSGFRRRELLVAGSALAASSLAGVFGGSEAGADVRPTGSISYPLDGLSIPKSLAPWGLDRSRAVLLVHDMQHYFVKPYRLGSDPMKTVLANAKSLLDTARASGIPVLYSGQPGGMTPEQRGLFLDLYGTGMPDDDAERAIVPPLERTSADVFITKSKISAFFHTDLLDTLRSLGRDQLVIVGVYTFSGVAATSMDALQNDIETFIAADATADYTLDEHRQALAWCAARTARVVTAQSIATALR

SEQ ID NO: 92877 - protein, 187 aa, Serinicoccus sp.
  REGION 1..187: note = tr|A0A1B1N8Q5|A0A1B1N8Q5_9MICO Isochorismatase; OS = Serinicoccus sp. JLT9 OX=1758689 GN=SGUI_0369 PE=4 SV=1
MERVGPTAALVVIDVQQGFLDEEYWGRRNNPHSESNIAVLLDHWRATARPVVFVRHDSTSTTSPLHPDAPGNDFQPVVTGEPDLLVRKSVNSSFHGTPDLHAWLRQEGITELVLCGITTNHCCETTARVGGNLGLDVWFALDATHTFDRQDPDGELVTADTLSRVTATNLHGEFATVTTTQFLTSTP

SEQ ID NO: 92878 - protein, 284 aa, Serratia ficaria
  REGION 1..284: note = tr|A0A240AIX9|A0A240AIX9_SERFI Isochorismatase; OS = Serratia ficaria OX=61651 GN=entB PE=4 SV=1
MAIPKLNDYALPAADELPNNKVSWQLEPQRAALLIHDMQQYFLNFWGEDSALIKQVVENIAKLRSYCKQQGIPVFYTAQPNQQSDEDRALLNDMWGPGLNKHPEQQAVTAALAPDQDDTVLVKWRYSAFHRSPLQEILQESGRDQLIICGVYAHIGCLTTAIDAFMRNIQPFMVADGLADFSREEHLMALRYTAGRCGRVVTTASLLPGIASKEALRQQILPLLDEDSEDMGNDENLIDYGLDSVRIMELATRWRKIRGDIDFIALARNPTIDSWWALLSAERN

SEQ ID NO: 92879 - protein, 284 aa, Serratia fonticola
  REGION 1..284: note = tr|A0A448T0K5|A0A448T0K5_SERFO Isochorismatase; OS = Serratia fonticola OX=47917 GN=entB PE=4 SV=1
MAIPKLNDYALPTPSELPVNKVNWAFEPQRAALLIHDMQQYFLNFWGEDSPLIKQVVENIAALRRYCKQQGIPVFYTAQPNQQSDEDRALLNDMWGPGLNKHPEQQAVVSELAPDADDTVLVKWRYSAFHRSPLQESLQESGRDQLIICGVYAHIGCMTTAIDAFMRNIKPFMVADGLADFSREEHLMALRYTAGRCGRVVTTADLLPGIASIDALRQQIIPLLDEDSEDIGNDENLIDYGLDSVRIMELATRWRKIREDIDFIALAKSPTIDSWWALLSERKS

SEQ ID NO: 92880 - protein, 283 aa, Serratia liquefaciens
  REGION 1..283: note = tr|A0A484YYP7|A0A484YYP7_SERLI Isochorismatase; OS = Serratia liquefaciens OX=614 GN=entB PE=4 SV=1
MAIPKLQAYALPEASDIPANKVNWAFEPSRAALLIHDMQEYFLNFWGENSAMMEKVVANIAALRDFCKQNGIPVYYTAQPKEQSDEDRALLNDMWGPGLTRSPEQQQVIAALAPDEDDTVLVKWRYSAFHRSPLEEMLKETGRDQLIITGVYAHIGCMTTATDAFMRDIKPFFVADALADFSREEHLMALKYVAGRSGRVVMTEELLPLPASKAALRALILPLLDESDEPLDDENLIDYGLDSVRMMALAARWRKVHGDIDFVMLAKNPTIDAWWALLTREVH

SEQ ID NO: 92881 - protein, 286 aa, Serratia marcescens
  REGION 1..286: note = tr|A0A0P0Q9A1|A0A0P0Q9A1_SERMA Isochorismatase; OS = Serratia marcescens OX=615 GN=entB PE=4 SV=1
MAIPKLNDYALPTADELPQNKVTWQVEPQRAALLIHDMQQYFLNFWGEDSALIKQVVENIANLRRYCKQQGIPVFYTAQPNQQSDEDRALLNDMWGPGLNKHPEQQAVTAALAPDEDDTVLVKWRYSAFHRSPLQEILQESGRDQLIICGVYAHIGCLTTAIDAFMRNIQPFMVADGLADFSRDEHLMALRYTAGRCGRVVTTASLLPAAGIASIDALRQQILPLLDEDSEDMGNDENLIDYGLDSVRIMELATRWRKIRSDIDFIALARNPTIDSWWALLSEEKA

SEQ ID NO: 92882 - protein, 284 aa, Serratia odorifera
  REGION 1..284: note = tr|D4E3D4|D4E3D4_SEROD Isochorismatase OS=Serratia odorifera DSM 4582 OX=667129 GN=entB PE=4 SV=1
MAIPKLNDYALPTAAEMPANKVNWAFEPQRAALLIHDMQQYFLNFWGEDSALIKQVVDNIANLRRYCKAQGIPVFYTAQPNEQSAEDRALLNDMWGPGLNKHPEQQAVVAALAPDADDTVLVKWRYSAFHRSPLQDILQESGRDQLIICGVYAHIGCLTTAIDAFMRNIKPFMVADGLADFSRDEHLMALRYTAGRCGRVVATADLLPGIASKDALRQQILPLLDEDSDDMANDENLIDYGLDSVRIMELATRWRKIRSDIDFIALAKSPTIDSWWALLSGEKA

SEQ ID NO: 92883 - protein, 284 aa, Serratia plymuthica
  REGION 1..284: note = tr|A0A2X4V7R4|A0A2X4V7R4_SERPL Isochorismatase; OS = Serratia plymuthica OX=82996 GN=entB PE=4 SV=1
MAIPKLNDYALPTQAELPTNKVSWTVEPQRAALLIHDMQQYFLNFWGEDSPLIKQVVENIANLRRYCKSQGIPVFYTAQPNQQSDEDRALLNDMWGPGLNKHPEQQAVVQALAPEDDDTVLVKWRYSAFHRSPLQEILQESGRDQLIICGVYAHIGCMTTAIDAFMRNIQPFMVADGLADFSRDEHLMALRYTAGRCGRVVTTAELLPGIASKAALRLQIMPFLDEDSEDMGDDENLIDYGLDSVRIMELAARWRKIRSDIDFIALAKSPTIDSWWAMLSQEKS

SEQ ID NO: 92884 - protein, 284 aa, Serratia proteamaculans
  REGION 1..284: note = tr|A8GHC7|A8GHC7_SERP5 Isochorismatase OS=Serratia proteamaculans (strain 568) OX=399741 GN=Spro_3419 PE=4; SV = 1
MAIPKLNDYALPTQAELPTNKVSWTVEPQRAALLIHDMQQYFLNFWGEDSPLIKQVVENIANLRRYCKSQGIPVFYTAQPNQQSDEDRALLNDMWGPGLNKHPEQQAVVAALAPEEDDTVLVKWRYSAFHRSPLQEILQESGRDQLIICGVYAHIGCMTTAIDAFMRNIQPFMVADGLADFSREEHLMALRYTAGRCGRVVTTAELLPGIASKAALRQQIMPFLDEDSEDMGDDENLIDYGLDSVRIMELAARWRKIRGDIDFIALAKNPTIDGWWTLLSEGKA

SEQ ID NO: 92885 - protein, 284 aa, Serratia quinivorans
  REGION 1..284: note = tr|A0A380ADN6|A0A380ADN6_9GAMM Isochorismatase; OS = Serratia quinivorans OX=137545 GN=entB PE=4 SV=1
MAIPKLNDYALPTQAELPTNKVSWTVEPQRAALLIHDMQQYFLNFWGEDSPLIRQVVENIANLRRYCKSQGIPVFYTAQPNQQSDEDRALLNDMWGPGLNKHPEQQAVVAALAPEEDDTVLVKWRYSAFHRSPLQEILQESGRDQLIICGVYAHIGCMTTAIDAFMRNIQPFMVADGLADFSREEHLMALRYTAGRCGRVVTTAELLPGIASKAALRQQIMPFLDEDSEDMGDDENLIDYGLDSVRIMELAARWRKIRGDIDFIALAKNPTIDGWWTLLSEGKA

SEQ ID NO: 92886 - protein, 288 aa, Serratia rubidaea
  REGION 1..288: note = tr|A0A2X5DCR7|A0A2X5DCR7_SERRU Isochorismatase; OS = Serratia rubidaea OX=61652 GN=entB PE=4 SV=1
MAIPKLNDYALPTAAELPANKVNWTVEPQRAALLIHDMQQYFLNFWGEDSPMIKQVVENIANLRRYCKSQGIPVFYTAQPNQQSDEDRALLNDMWGPGLNKHPEQQAVVAALAPEEDDTVLVKWRYSAFHRSPLQDILQETGRDQLIICGVYAHIGCLTTSIDAFMRNIQPFMVADGLADFSRDEHLMALRYTAGRCGRVVSTAELLPQSNAIASKEALRAMILPLLDEDSEDMGNDENLIDYGLDSVRIMELATRWRKIRGDIDFIALAKNPTIDSWWALLAGEQAG

SEQ ID NO: 92887 - protein, 267 aa, Serratia symbiotica
  REGION 1..267: note = tr|A0A068Z177|A0A068Z177_9GAMM Isochorismatase; OS = Serratia symbiotica OX=138074 GN=entB PE=4 SV=1
MEPKRCALLIHDMQNYFLNFWDEQSPMIRQVIANLVALRERGHQLGIPVFYTGMPNHQQPEDRALLNDMWGPGLNRHPEQQQFVEPLAPAEQDTVLVKWRYSAFQRSDLESRLRELKRDQLIIGGVYAHIGCLTTATDAFMRDIQPFMVADALADFSQQEHEMALRYTAGRSGRILSTEAALAELKASDDRAWNKEKLLALLANALDEDTEALADDDNLLDYGLDSVRIMSLASHWRKEGHKLNFVALVKQPTLKAWLTLLNARQEA

SEQ ID NO: 92888 - protein, 180 aa, Shewanella sp.
  REGION 1..180: note = tr|F7RIV2|F7RIV2_9GAMM Isochorismatase OS=Shewanella sp. HN-41 OX=327275 GN=SOHN41_00282 PE=4 SV=1
MLKPEKCVLVIVDVQGKLAQIMDKTEKLHQQLQTLIQGAQLFDIPILWLEQLPDKLGSTSPELKTLLENTTTPIAKQHFSGWHCEAFAQALIKTNRQHVILAGIETHVCVYQTCCDLIEQQYSVHLVADGVSSRSADNKQLGIQMMTARGALLTNVESLLFELQHQAQGERFRALIKLIK

SEQ ID NO: 92889 - protein, 285 aa, Shigella boydii
  REGION 1..285: note = tr|I6ESG2|I6ESG2_SHIBO Isochorismatase OS=Shigella boydii 4444-74 OX=766140 GN=entB PE=4 SV=1
MAIPKLQAYALPESHDIPQNKVDWAFELQRAALLIHDMQDYFVSFWGENCPMMEQVIANIAALRDYCKQHNIPVYYTAQPKEQSDEDRALLNDMWGPGLTRSPEQQKVVDRLTPDADDTVLVKWRYSAFHRSPLEQMLKESGRNQLIITGVYAHIGCMTTATDAFMRDIKPFMVADALADFSRDEHLMSLKYVAGRSGRVVMTEELLPAPVPASKAALREVILPLLDESDEPFDDDNLIDYGLDSVRMMALAARWRKVHGDIDFVMLAKNPTIDAWWKLLSREVK

SEQ ID NO: 92890 - protein, 222 aa, Shigella dysenteriae
  REGION 1..222: note = tr|B3WZW2|B3WZW2_9ENTR Isochorismatase OS=Shigella dysenteriae 1012 OX=358708 GN=Sd1012_3996 PE=4 SV=1
MAIPKLQAYALPEPHDIPQNKVDWAFEPQRAALLIHDMQDYFVSFWGENCPMMEQVIANIAALRDYCKQHNIPVYYTAQPKEQSDEDRALLNDMWGPGLTRSPEQQKVVDRLTPDADDTVLVKWRYSAFHRSPLEQMLKESGRNQLIITGVYAHIGCMTTATDAFMRDIKPFMVADALADFSRDEHLMSLKYVAGRSGRVVMTEELLPALGPASKAALREVK

SEQ ID NO: 92891 - protein, 285 aa, Shigella flexneri; identical to SEQ ID NO: 92889
  REGION 1..285: note = tr|K0XCF6|K0XCF6_SHIFL Isochorismatase OS=Shigella flexneri 1485-80 OX=766155 GN=dhbB PE=4 SV=1

SEQ ID NO: 92892 - protein, 285 aa, Shigella sonnei
  REGION 1..285: note = tr|A0A0I1LXU9|A0A0I1LXU9_SHISO Enterobactin biosynthesis bifunctional isochorismatase/aryl carrier protein EntB OS=Shigella sonnei OX=624 GN=entB PE=4 SV=1
MAIPKLQAYALPESHDIPQNKVDWAFEPQRAALLIHDMQDYFVSFWGENCPMMEQVIANIAALRDYCKQHNIPVYYTAQPKEQSDEDRALLNDMWGPGLTRSPEQQKVVDRLTPDADDTVLVKWRYSAFHRSPLEQMLKESGRNQLIITGVYAHIGCMTTATDAFMRDIKPFMVADALADFSRDEHLMSLKYVAGRSGRVVMTEGLLPAPVPARKAALREVILPLLDESDEPFDDDNLIDYGLDSVRMMALAARWRKVHGDIDFVMLAKNPTIDAWWKLLSREVK

SEQ ID NO: 92893 - protein, 204 aa, Sinorhizobium americanum
  REGION 1..204: note = tr|A0A1L3LCW5|A0A1L3LCW5_9RHIZ Isochorismatase; OS = Sinorhizobium americanum CCGM7 OX=1408224; GN = SAMCCGM7_pC0686 PE=4 SV=1
MTDHAANAAAEKSALILIEYVNDWLAPTGGINGQFQDREQFDLAVANSKEVLEEARRRNMDVIHVTVRFEPTYKVLGEGKYGLRKMMLDYRSFLGEQADFFPGFEPQDGEFVVSERPGGSSAFAGTTLDSYLRNNRIFDIYVMGFALRQCVESTVRNAHDLGYHTNVIYDASAAFTRKQQTSFLSDIAPFYANAVTTREFLTQA

SEQ ID NO: 92894 - protein, 238 aa, unidentified
  source 1..238: note = Sinorhizobium fredii
  REGION 1..238: note = tr|Q6W1P7|Q6W1P7_SINFN Isochorismatase; OS = Sinorhizobium fredii (strain NBRC 101917 / NGR234); OX = 394 GN=NGR_b03960 PE=4 SV=1
MNSLGSLPITSHKLSHIDADPYPWPYNGDLRPENTALIIIDMQTDFCGPGGYVDHMGYDLSLVRAPIEPIRKVLSAMRAKGYHIIHTREGHRPDLADLPANKRWRSQRIKAGIGDAGPCGRILVRGEPGWEIIDALKPIQGETIIDKPGKGSFCATDLELILNQKRIDNIVLTGITTDVCVHTTMREANDRGFECLLLEDCCGATDYGNHLAAIKMVKMQGGVFGSVSNSATLVGQLP

SEQ ID NO: 92895 - protein, 180 aa, unidentified
  source 1..180: note = Snodgrassella alvi
  REGION 1..180: note = tr|A0A066THK6|A0A066THK6_9NEIS Isochorismatase; OS = Snodgrassella alvi OX=1196083 GN=BGI29_00570 PE=4 SV=1
MLIDSKRSTVLMIDLQTRLLPALNNTDEVLANNIWLAGLAHDMAIPTLISEHCVDKIGATHEEIMTAAPQAKIVQKQNFSVFSAGVLTKDNLQQANQIIISGIEAHICVLQTAFDLCAHGYEVFVVADAVSSRRQRDVELGLARMQTSGCQIVSREMIAFEWLGSANNPQFKEIHKKYIR

SEQ ID NO: 92896 - protein, 221 aa, unidentified
  source 1..221: note = Solibacillus isronensis
  REGION 1..221: note = tr|K1KRU0|K1KRU0_9BACL Isochorismatase; OS = Solibacillus isronensis B3W22 OX=1224748 GN=dhbB_2 PE=4; SV = 1
MAIPAISSYKMPKESNLPKNKVGWKVDPNKSVLLIHDMQQYFIDYYEKDSSLVREMIANIKVIRKQCDELGIPVVYTAQSGNQNPEERALLTDFWGTGLKDDPNITKVIDELAPGKADIVLKKWRYSAFKKSNLLEMMNEQGRDQLIICGVYAHIGCLMTAGEAFMSDIKPFFIADAVADFTQPEHEMAINYVAGRCGAVYSTAQIMDQLKREASAEAELV

SEQ ID NO: 92897 - protein, 219 aa, Sorangium cellulosum
  REGION 1..219: note = tr|A9GA70|A9GA70_SORC5 Isochorismatase OS=Sorangium cellulosum (strain So ce56) OX=448385 GN=sce2665 PE=4 SV=1
MIGGDRCPTRRRPQYITAHDMPRRSHDLHGAAPDDSRTALLLIDVINDLDFPGGDRLLAHALPMAHRIRALKQRCRDAGIPAVYVNDNFGRWQSNFHRQIEHCLEEGVRGREIAALLRPGEDDYFVLKPKHSGFYGTTLEILLESLGAQTLLLTGMAGNICVLFTANDAYMRDYRLLVPSDCVASETEEDNGHALRQMQRFLKADITPSDELDLERLPA

SEQ ID NO: 92898 - protein, 204 aa, Sphingobium japonicum
  REGION 1..204: note = tr|N1MN06|N1MN06_9SPHN Isochorismatase; OS = Sphingobium japonicum BiD32 OX=1301087 GN=EBBID32_26920; PE = 4 SV=1
MDVKKTAVLLIEYQNDFTTEGGAQHAAVQAVMDTTGMMRHSRALLDAARARGVTVLHAPISFAEGYPEIPVHPYGILAGVVGAKAFRKGSWGAEIAAEMAPVEGEIVIEGKRGLDCFASTNLDFILRQRGITDLAIGGFLTNCCVESTMRSAYERGYRVVTLTDCTATLSAAEQTAAVEKNFPMFSHPLTHDAFLAELDQGAVS

SEQ ID NO: 92899 - protein, 195 aa, Sphingomonas dokdonensis
  REGION 1..195: note = tr|A0A245ZUC1|A0A245ZUC1_9SPHN Vibriobactin-specific isochorismatase OS=Sphingomonas dokdonensis OX=344880; GN = vibB PE=4 SV=1
MNGKAAILIIDLLNTFDFDGGDALKEIVAEMVAPLREFRQQARAAKVPVIFVNDNYGRWHDEPSQLIAFAIAGKGGHVIRQLAPEQGDYFVIKPESSGFYATTLPALLPRLGVSRLVVIGVAADICVLFTAADAHMREYDLWVPRDLVASHHDERARWALEMMQNGMSAEIRPTSELSLADWLATTPKVRAGHTG

SEQ ID NO: 92900 - protein, 195 aa, Sphingomonas mucosissima
  REGION 1..195: note = tr|A0A245ZG02|A0A245ZG02_9SPHN Isochorismatase; OS = Sphingomonas mucosissima OX=370959 GN=dhbB PE=4 SV=1
MNGKAAILVIDLLNTFDFTGGDTLKDQVSAMVDPLRSLRQHAKSADVPVIFVNDNYGRWHDEPSELVAFASEGKGGPLIAQLKPEEDDYFVIKPESSGFYATTLPALLPRLGVTRLVLVGVAADICVLFTAADAHMREYDLWVPRDLVASQHEERAGWALEMMENGMSAKTRPTSELSLADWLASAPKVRQGRAD

SEQ ID NO: 92901 - protein, 219 aa, Sphingomonas sp.
  REGION 1..219: note = tr|A0A0D4ZZG8|A0A0D4ZZG8_9SPHN Isochorismatase; OS = Sphingomonas sp. JE1 OX=1628059 GN=pJE1_013 PE=4 SV=1
MVEENKTARQLFEEVMANPERAKFGFGRKLAIVNVDPQKAYTCIDEFKTAYETDPRQIEYINSISSLARAKGMPVIWTHVAYAEDGSDCGIWGTRTNTPDSLQNIKYGSRRYEFDDRCEIDPKDMVYTKRMPSAFFETPLQSLLVYHGVDTVVVTGGSTSGCVRATAVDALSRGYRTIVPIETCADKHESFHFANLTDLAIKYADVEPVQTVIDWLEAQ

SEQ ID NO: 92902 - protein, 212 aa, Sphingopyxis sp.
  REGION 1..212: note = tr|A0A0M9TZY2|A0A0M9TZY2_9SPHN Isochorismatase; OS = Sphingopyxis sp. C-1 OX=262667 GN=SC1_03664 PE=4 SV=1
MALPTYKRASTALLFIDPYNDFLSEGGKAWPRVGPIAEEIGLLDNLRAIVAAVRNAGIQVVIAPHRRWEPGDYEDWDHPNPTQIGIMSRHSFARGEWGGEWHPDFVPESGDIVAKEHWGQSGFANTDLDQQLRQRGITHVILIGLLANTCVESTGRYAMEIGYHVTLVRDATAAYSKEMMHAAHELNGPTYAHAILTTAELLEAIAAAGVDR

SEQ ID NO: 92903 - protein, 81 aa, Sporolactobacillus inulinus
  REGION 1..81: note = tr|A0A4Y1ZBX8|A0A4Y1ZBX8_9BACL Isochorismatase; OS = Sporolactobacillus inulinus OX=2078 GN=NBRC111894_1732; PE = 4 SV=1
MIAGCQTEYCIDTAVRMATVNGFDVTLVGDAHGTADTPVLSAEQIVKHHNQTLNGYDNDDHFSLVRNSDEALFQPIHERYR

SEQ ID NO: 92904 - protein, 225 aa, Sporomusa sp.
  REGION 1..225: note = tr|A0A0U1L4A6|A0A0U1L4A6_9FIRM Isochorismatase; OS = Sporomusa sp. An4 OX=411922 GN=SpAn4DRAFT_0176 PE=4 SV=1
MKKHLEITIRQIINQKILSFDERQACLMNERLLKETALIIIDVQKAIDNPVWFQYGARNNLNAENNMTEILNLWRKSGQPIFHVKHESNELNSTYRPGQAGCNFKECVAPLEGEHIIVKHVNSAFIGTGLESMLKKLNVSCVVIFGVITNNSVDASVRMSGNLGFITYLVEDACFTYAKPDFCGCVRTADEVHAMTLSNLDNEYCQVISTYNLKKILTGNTTKIP

SEQ ID NO: 92905 - protein, 178 aa, Sporomusa sphaeroides
  REGION 1..178: note = tr|A0A1U7MEP0|A0A1U7MEP0_9FIRM Vibriobactin-specific isochorismatase OS=Sporomusa sphaeroides DSM 2875; OX = 1337886 GN=vibB PE=4 SV=1
MRITKEDSLVLLIDVQEKLYPHMNNKEKLSQKTITLLKGITALGIPLTAARQYPQGLGDIIEELRPYGSECYDKVTFSCCGNDNLIARLRESGCKYVIIAGIEAHICVLQTVIDLKALGYLPVVVTDAISSREQQDYEIALRRMEYKGAILTTVESILFELCREAGNEVFKTISRLVK

SEQ ID NO: 92906 - protein, 179 aa, Sporomusa termitida
  REGION 1..179: note = tr|A0A517DUL3|A0A517DUL3_9FIRM Vibriobactin-specific isochorismatase OS=Sporomusa termitida OX=2377 GN=vibB; PE = 4 SV=1
MRIEKENALLLVVDMQEKLFPHINRHQELIKKTLILLAGLKALAVPMMAARQYPRGLGDTIEELRPYFTTGYWDKLTFSCCGSEPLLAQLQGSGRKAVIIAGIEAHICVLQTVIDLKEHGLVPVVVTDAVGSRTDRDYEIALRRMEQAGAVLTTVESILFELCRQAGSEAFKTISKLVK

SEQ ID NO: 92907 - protein, 185 aa, Sporosarcina newyorkensis
  REGION 1..185: note = tr|F9DMZ9|F9DMZ9_9BACL Isochorismatase; OS = Sporosarcina newyorkensis 2681 OX=1027292 GN=pncA PE=4; SV = 1
MMELKKALLVVDYTVDFVAIDGALTCGEPGIALENHIVQLTKDFLAQQQPVFVINDLHEKDDPYHPENALFPAHNIRGTFGRNLYGKMHDLYSEHSDEIIWMDKTRYSAFAGTDLDIQLRARDIREIHLTGVCTDICILHTAIDAYNLGYKIFIHEGGVASFNPAGHDWALSHFQNTLGATVISN

SEQ ID NO: 92908 - protein, 270 aa, Stackebrandtia nassauensis
  REGION 1..270: note = tr|D3Q5B3|D3Q5B3_STANL Isochorismatase; OS = Stackebrandtia nassauensis (strain DSM 44728 / NRRL B-16338 / NBRC 102104 / LLR-40K-21) OX=446470 GN=Snas_4517; PE = 4 SV=1
MSIPTLDIYPLPTEAELPKPRVPWTFDPNRAALLIHDMQRYFLDFYGEEFGELVDNIAQLRKLDLPTFYTAQPPKQSPDERGLLSDRWGPGIQDREDIVAPLAPASSDVVLTKHRYSAFHRTDLAERLAAAGRDQLIITGVYAHIGITATALDAFSHGIETFVIADAIADFGRGRHVAALEHLSATCAVVTTLNRLLDSGFGLADVRAQVLALLDEPADDDENLIDAGLDSIRVMGLIEDWKERGHNVTFADLAADPTIRGFHAALEAAR

SEQ ID NO: 92909 - protein, 165 aa, Staphylococcus aureus
  REGION 1..165: note = tr|A0A0H2WYH7|A0A0H2WYH7_STAAC Isochorismatase; OS = Staphylococcus aureus (strain COL) OX=93062 GN=entB; PE = 4 SV=1
MDYAPYTAENVVQNANKLIDVFRKNNGFIAFVRVNFYDGKDVLQPNAMISLPPKEGDDYSRFHHLLDKRDDDFVIDKRHFSAFVGTDLDLQLRRRGIDTIVLGGVATHIGVDTTARDAYQLNYNQFFVTDMMSAQNETLHQFPIDNVFPLMGQTITTNDFLNILN

SEQ ID NO: 92910 - protein, 186 aa, unidentified
  source 1..186: note = Staphylococcus schweitzeri
  REGION 1..186: note = tr|A0A2K4AHG5|A0A2K4AHG5_9STAP Cysteine hydrolase; OS = Staphylococcus schweitzeri OX=1654388 GN=entB PE=4 SV=1
MSRKSALLVLDMQEGIASSVPRIKNIVKANQRAIEAARQHRIPVIFIRLVLDKHFNDVSSSNKVFSTIKAQGYAITETDASTRILESLDPLEDEPIISKRRFSAFTGSYLEVYLRANDINHLVLTGVSTSGAVLSTALESVDKDYYITVLEDAVGDRSDDKHDFIIEQILSRSCEIESVESWKSSL

SEQ ID NO: 92911 - protein, 218 aa, Starkeya novella
  REGION 1..218: note = tr|D7A8S2|D7A8S2_STAND Isochorismatase OS=Starkeya novella (strain ATCC 8093 / DSM 506 / CCM 1077 / IAM 12100 / NBRC 12443 / NCIB 9113) OX=639283 GN=Snov_3332 PE=4 S V=1
MTAKLGGKPGLPTVAPYDLPRADELPKPRAPWKLDRDRAALLIHDMQNYFLRIFDADAAPIAPVIANIAALAKAARAAGVPVFYTAQEGNQDRRDRGLQADLWGPGMSAAPEHQPVVAPLAPEPGDFVLVKHRYSAFQRSNLEALMRARGRDQLIICGVYAHIGCTLTAADAFMRDIEPFMAADALADFSRAKHDLALSYAADVCAVPLMTAAILEVL

SEQ ID NO: 92912 - protein, 211 aa, Stenotrophomonas maltophilia
  REGION 1..211: note = tr|B4SLS4|B4SLS4_STRM5 Isochorismatase; OS = Stenotrophomonas maltophilia (strain R551-3) OX=391008; GN = Smal_2274 PE=4 SV=1
MALPRITNYSLPTAAELPQARGPWRPQRDRVALLVHDMQRYFLAAFDARNAPLRPAVDNIVRLLAHCRAHGIPVFYTAQHGDQDRRDRGLQADLWGPGMRRSADHEPIIEALAPQPGEHVLVKHRYSAFQRSNLETLMRVRGRDQLLVTGVYAHIGCTATVVEAFQRDIEAFIAADAVADFSRADHDQALHWIARTCGVPMTTDQLLEVLR

SEQ ID NO: 92913 - protein, 146 aa, Stenotrophomonas sp.
  REGION 1..146: note = tr|B8L5H2|B8L5H2_9GAMM Isochorismatase hydrolase; OS = Stenotrophomonas sp. SKA14 OX=391601 GN=SSKA14_1398; PE = 4 SV=1
MLIDFQSQMAFATHTIDISALRNNVSLISKGAKGFSVPVLLTTVAETSFSGPMFPELPEIFPGQPVFDRTSMNTWEDQAVIAEINRIGKRRLVLAGLWTSVCIVGPALSALAQGFEVHVITDACGDVSEEAHERAITRMVQAAQCR

SEQ ID NO: 92914 - protein, 310 aa, Stigmatella aurantiaca
  REGION 1..310: note = tr|Q096Z5|Q096Z5_STIAD Isochorismatase; OS = Stigmatella aurantiaca (strain DW4/3-1) OX=378806; GN = mxcF PE=4 SV=1
MALPAIAPYRMPSAADLPANKVSWTPDSQRSVLLIHDMQRYFVDAFTSGASPVTELVANIRQLRQHCISLGIPVVYSAQPGGQTPEQRGLLLDFWGAGINGGPHQKQIIDALAPAEGDIVLTKWRYSAFNRTQLMDILRQGKRNQLIICGIYAHIGCLQTASEAFMNEVQPFFVADGVADFSWENHQMALNYAARLCAVTTTTQQLIEQLRPQAIRGGAPLSRQQIRADVVELLQQDAALGDDENLLERGLDSIRLMSLVERWRNTGAEVTFVELAERPTLTDWYAMLTSTAQPPVEVAAAFQRGVRPTA

SEQ ID NO: 92915 - protein, 186 aa, Streptococcus acidominimus
  REGION 1..186: note = tr|A0A239WEV8|A0A239WEV8_STRAI Isochorismatase; OS = Streptococcus acidominimus OX=1326 GN=entB PE=4 SV=1
MKRALMLIDIQNTFRDGSWGPRNNDSAEEQSARLLAYFRETKELVIHVNHISKSPESRFFHQGEGFDFQDMVRPLEGELVISKTVNSAFIGTKLKEYLDDNKVDTLIIAGLTTPHCVSTTTRMAGNYGFATYLVEDATAAFDLRDPKGNIIPAQTIHEISLATLHDEFATIVTTEAVINEEYSKEI

SEQ ID NO: 92916 - protein, 173 aa, Streptococcus agalactiae
  REGION 1..173: note = tr|A0A380IYH5|A0A380IYH5_STRAG Isochorismatase; OS = Streptococcus agalactiae OX=1311 GN=NCTC9828_00821 PE=4; SV = 1
MTCALLLIDIQQGIMDKKPKHLTNFAELLDDLLLSAKGPNCEVIWIRHHDKELPQGSLQWEIWEQRHLVTHHKIIDKTYNSCFKDTHLHDYLQSKHISQLIMMGLQTEYCFDTSVKVAFEYGYNIFIPQGGHLTFDTPTLSGDSIKKHYENIWHHRFATMVAKDSLLKLINEE

SEQ ID NO: 92917 - protein, 170 aa, Streptococcus anginosus
  REGION 1..170: note = tr|A0A4U9ZTK0|A0A4U9ZTK0_STRAP Isochorismatase; OS = Streptococcus anginosus OX=1328 GN=rutB PE=4 SV=1
MKTALLVIDIQTALIEAKPYAVDNCLSVWQKAIATCREKNIEVIYVRHNDDELLTGSHGWEIYGAIAPEVGEKIFDKHYNSAFKETHLQTYLDSQAIERLIIIGMATNYCIDTTVKVAFEFGYNLAVVKNGTTTFAEREITAEQLIQYYENAWNGRFAQVADLEEILKED

SEQ ID NO: 92918 - protein, 174 aa, Streptococcus cristatus
  REGION 1..174: note = tr|A0A139MXB0|A0A139MXB0_STRCR Isochorismatase; OS = Streptococcus cristatus OX=45634 GN=SCRDD08_01981 PE=4; SV = 1
MTQALIVVDIQEGLINLGPANKEPFIATVKQTIASFEEAGKEVIYIRHTEAEGFLSEGDASWQVYHELSPRPQDRIFNKNFNSMYRGTELKAYLDSKGITSYSVVGMQAEFCIDTSLKVGFEYGFEQVLVRDAVTTFDNDHLPAQKIIDFYQDHIWDNRFAKVLPVETIQAANK

SEQ ID NO: 92919 - protein, 170 aa, Streptococcus dysgalactiae
  REGION 1..170: note = tr|A0A4V0DRG7|A0A4V0DRG7_STRDY Isochorismatase; OS = Streptococcus dysgalactiae OX=1334 GN=rutB PE=4 SV=1
MKKALLVIDCQKALVEAKPYAIAACLRTWQRAIQKARCQGMEVIYVRHQDDDLVFGSGGWEIHESLTPQSSEKIVDKSYNSAFKATGLAAYLNQKGIDNLVMIGMLTNYCMDTTVRVAFELGYEVSVIEHGSTTFDDEDIQASLLIDYHESLWDGNFARVEPLDVILNEE

SEQ ID NO: 92920 - protein, 170 aa, Streptococcus equinus
  REGION 1..170: note = tr|A0A447UAN2|A0A447UAN2_STREI Isochorismatase; OS = Streptococcus equinus OX=1335 GN=yecD PE=4 SV=1
MKTALLVIDIQTALIEAKPYAVDNCLSVWQKAIATCREKNIEVIYVRHNDDELLTGSHGWKIYEAIAPEVDEKIFDKHYNSAFKETHLQTYLDSQAIERLIIIGMATNYCIDTTVKVAFEFGYDLAVIKNGTTTFAEREITAEQLIQHYESTWNGRFAQVADLEEILKED

SEQ ID NO: 92921 - protein, 185 aa, Streptococcus ferus
  REGION 1..185: note = tr|A0A2X3VN58|A0A2X3VN58_9STRE Isochorismatase; OS = Streptococcus ferus OX=1345 GN=yecD_1 PE=4 SV=1
MRKALLLIDIQKTFRDGSWGGRNNDAAENNASRLLASFREHGDLVIHVQHKSQNPNSRFYVKNEGVGFQDSVLPLDGEQLISKSVNSAFIGTHLQDYLEENGVSTLVIAGLTTPHYVSTTTRMASNLGYKTYLVEDATASFALQNHQGKTFSPQDVQEISLATLHDEFAVIVSTDDVIKHYHQLN

SEQ ID NO: 92922 - protein, 170 aa, Streptococcus gallolyticus
  REGION 1..170: note = tr|F5WWP6|F5WWP6_STRG1 Isochorismatase; OS = Streptococcus gallolyticus (strain ATCC 43143 / F-1867); OX = 981539 GN=SGGB_1847 PE=4 SV=1
MKTALLVVDIQTALIEAKPYAVDNCLSVWQKAIATCREKNIEVIYVRHNDDELLTGSHGWEIYEAIAPEVDEKIFDKHYNSAFKETHLQPYLDSQVIERLIIIGMATNYCIDTTVKVAFEFGYNLAVIKNGTTTFAEREITAEQLIQHYESTWNGRFAQVADLEEILKED

SEQ ID NO: 92923 - protein, 174 aa, Streptococcus gordonii
  REGION 1..174: note = tr|A0A139N158|A0A139N158_STRGN Isochorismatase; OS = Streptococcus gordonii OX=1302 GN=SGODD07_01723 PE=4; SV = 1
MTQALIVVDIQEGLINLGPANKEPFIATVKQTVASFEEAGKEVIYIRHTEAEGFLSEGDASWQVYHELSPRPQDRIFNKNFNSMYRGTELKAYLDSEGITSYAVVGMQAEFCIDTSLKVGFEYGFEQVLVRDAVTTFDNDHLPAQKIIDFYQDHIWDNRFAKVLPVETVQAANK

SEQ ID NO: 92924 - protein, 191 aa, Streptococcus infantis
  REGION 1..191: note = tr|J1SCU1|J1SCU1_9STRE Isochorismatase; OS = Streptococcus infantis SPAR10 OX=1159208 GN=entB PE=4; SV = 1
MAKALISIDYTEDFVADHGKLTAGAPAQAISDNIYHVTQKAFERGDYIFFTIDAHEENDVFHPESKLFPPHNIIGTSGRNLYGKLAEFYQEYADDSRVFWMDKRHYSAFSGTDLDIRLRERRVDTVILTGVLTDICVLHTAIDAYNLGYQIEVVKPAVASIWPENHAFALGHFKNTLGAKLVDENLLEITE

SEQ ID NO: 92925 - protein, 141 aa, Streptococcus lutetiensis
  REGION 1..141: note = tr|A0A2X3WFY1|A0A2X3WFY1_9STRE Isochorismatase; OS = Streptococcus lutetiensis OX=150055 GN=NCTC8738_01760; PE = 4 SV=1
MKTALLVIDIQTALIEAKPYVVDNCLSVWQKAIATCREKNIELIYVRHNDDELLTGSHGWKIYEAIAPEVDEKIFDKHYNSAFKETHLQTYLDSQAIERLIIIGMATNYCIDTTVKVAFEFGYDLKMARLPLLKEKLQQNN

SEQ ID NO: 92926 - protein, 170 aa, unidentified; identical to SEQ ID NO: 92917
  source 1..170: note = Streptococcus milleri
  REGION 1..170: note = tr|A0A3S4MCY2|A0A3S4MCY2_9STRE Isochorismatase; OS = Streptococcus milleri OX=33040 GN=rutB PE=4 SV=1

SEQ ID NO: 92927 - protein, 166 aa, Streptococcus mitis
  REGION 1..166: note = tr|A0A139QCC6|A0A139QCC6_STRMT Isochorismatase; OS = Streptococcus mitis OX=28037 GN=SMIDD28_00386 PE=4 SV=1
MKTAFIIIDVQNILVETGFKTERLLEKISYLQNQARSKNIEIIYVQHIENAEAQTSEDWQLSELLSRKPDEKVFQKKYNSIFKETGLKEYLDKQGIEKLVLCGMQTEYCVDTSVKVAFEYGYQLIIPEGAVTTFDGDDIPAETINEFYEDIWEDRFADVLDYKNIF

SEQ ID NO: 92928 - protein, 191 aa, Streptococcus oralis
  REGION 1..191: note = tr|A0A139QSI8|A0A139QSI8_STROR Isochorismatase; OS = Streptococcus oralis OX=1303 GN=SORDD24_00757 PE=4 SV=1
MTQTTLLIIDMQQAFEKDAWGERNNPHAEEKALQVLQFFRKHKLPICHIQHVSSNPCSLFYTKQGQAFKNRFEPIAGEIIFQKTVNSAFIGTGLEQYLHEQKVSQLVIVGLTLPHCISTTTRMASNLGFKVTLLADATASFSLPDRNGQLVHPDIIHNVNLISLQNEFAQILDTDKFLTYSQNNPLTLPRV

SEQ ID NO: 92929 - protein, 166 aa, Streptococcus parasanguinis
  REGION 1..166: note = tr|A0A359YHI9|A0A359YHI9_STRPA Isochorismatase; OS = Streptococcus parasanguinis OX=1318 GN=SPADD19_00722; PE = 4 SV=1
MKTAFIIIDVQNILVETGFETEKLLEKIAYLQEQARKQQVEIIYMQHIETPEALTSEDWQLSPLLKRQADEKVFQKRYNSIFKETGLKEYLDQQGIEQLVLCGMQTEYCVDTSVKVGFEYGYKLVIPEGAVTTFDGEDIPAETLNEFYENIWAERFADVLDYQSIF

SEQ ID NO: 92930 - protein, 285 aa, Streptococcus pneumoniae; identical to SEQ ID NO: 92562
  REGION 1..285: note = tr|A0A4U9M1X1|A0A4U9M1X1_STREE Isochorismatase family protein yecD OS=Streptococcus pneumoniae OX=1313; GN = entB_1 PE=4 SV=1

SEQ ID NO: 92931 - protein, 86 aa, Streptococcus pyogenes
  REGION 1..86: note = tr|Q1J8F2|Q1J8F2_STRPF Isochorismatase; OS = Streptococcus pyogenes serotype M4 (strain MGAS10750); OX = 370554 GN=MGAS10750_Spy0259 PE=4 SV=1
MQLFKGEVIEKGIDNLVMIGMLTNYCMDMTVRVAFELGYEVSVIEHGSTTFDDEDIQASLLIDYHESLWDGNFARVEPLDVILNEE

SEQ ID NO: 92932 - protein, 167 aa, Streptococcus sanguinis
  REGION 1..167: note = tr|F3UCK1|F3UCK1_STRSA Isochorismatase; OS = Streptococcus sanguinis SK1056 OX=888820; GN = HMPREF9393_1269 PE=4 SV=1
MKTVLIIIDVQNILVETGFQSDKMMDKISFLQHQARSKGAEIIYIQHVENPEDNALEDWQLSPLLNRKSDEKVFQKKYNSIFKETGLKDYLEKEDIGRLVLCGMQTEYCVDASVKVGFEFDYKLIIPEGAFTTFDGEDASAEKINTFYQKIWDGRFADVLDYKNIFN

SEQ ID NO: 92933 - protein, 174 aa, Streptococcus sp.
  REGION 1..174: note = tr|A0A139NIH1|A0A139NIH1_9STRE Isochorismatase; OS = Streptococcus sp. DD12 OX=1777880 GN=STRDD12_00765 PE=4; SV = 1
MTEALIVVDIQEGLIDLGPANKDTFLSKVKATIAAFEAAGKEVIYFRHTEPEGFLSEGDASWEVYHELTPRPEDNIFRKNFNSIYRGTGLKAYLDEKGIKSYTVVGMQAEFCIDTSLKVGFEYGFEQILVRDAVTTFDKDQLKAQAIIDFYQDHIWDKRFAEVLPVEEVVAALE

SEQ ID NO: 92934 - protein, 196 aa, Streptococcus thermophilus
  REGION 1..196: note = tr|A0A2X3V032|A0A2X3V032_STRTR Isochorismatase; OS = Streptococcus thermophilus OX=1308 GN=NCTC12958_00426; PE = 4 SV=1
MQGLLMIDMQRAFDNSSWGERNNPQLEVNSQKLLNFFRERGWPVLHVQHVYTNTQSRFHESQGQDFKDGFQPYPSEPVFQKIVNSAFIRTNLESYLRDKRIDKLVIAGFTLPHCVSTTTRMAANLGFKTSLISDATASFALPNLDGHLIDPEVLHTINLVSLHDEFAQVMTIEEFMGDDNEELYAFCPSGVMPSAI

SEQ ID NO: 92935 - protein, 151 aa, Streptococcus vestibularis
  REGION 1..151: note = tr|A0A448AC92|A0A448AC92_STRVE Isochorismatase; OS = Streptococcus vestibularis OX=1343 GN=entB PE=4 SV=1
MKTAFIIIDVQNILVETGFETQKLLEKISYLQDQARKQQIEIIYIQHIETEEALTSEDWKLSPLLKRQSDEKVFQKRYNSIFKETGLKEYLDQQGIEKLVLCGMQTEYCVDTSVKVAFEHGYKLVVPEGTVTTFDGDDIPAETINDFYENI

SEQ ID NO: 92936 - protein, 170 aa, unidentified
  source 1..170: note = Streptococcus viridans
  REGION 1..170: note = tr|A0A380M4Y8|A0A380M4Y8_9STRE Isochorismatase; OS = Streptococcus viridans OX=78535 GN=rutB PE=4 SV=1
MKMALLVIDIQTALIEAKPYAVDNCLSVWQKAIATCREKNIEVIYVRHNDDERLTGSHGWEIYGVIAPEVGEKIFDKHYNSAFKETHLQTYLDSQAIERLIIIGMATNYCIDTTVKVAFEFGYDLAVVKNGTTTFAEREITAEQLIQHYENAWNGRFAQVADLEEILKED

SEQ ID NO: 92937 - protein, 217 aa, Streptomonospora sp.
  REGION 1..217: note = tr|A0A4V0ZK20|A0A4V0ZK20_9ACTN Putative isochorismatase OS=Streptomonospora sp. M2 OX=2498135; GN = phzD PE=4 SV=1
MPGIPEIVSYPLPRESDLPDNTVPWSIDPDRAVLLVHDLQEFFLRPLPEQMRTPMVAAAAALGEAARVGGAPIAYTAQPGGMTARQRGLLRDFWGPGMRVSAQDRRIVPQVAPAEGDWLLTKWRYSAFHATDLLELMRRHGRDQLVLCGVYAHVGVLATAIESFSNDIETFLVADALADFSAEHHRMALHYAADRCAAVLTTDASTEALVGPVARTR

SEQ ID NO: 92938 - protein, 126 aa, Streptomyces acidiscabies
  REGION 1..126: note = tr|A0A117E6I9|A0A117E6I9_9ACTN Putative isochorismatase OS=Streptomyces acidiscabies OX=42234; GN = phzD PE=4 SV=1
MTPQQRGLLKDFWGPGMRVDPVDREVVEPVAPRDGDWLLTKWRYSAFFNTDLLQRMRDAGRDQLVVCGIYAHVGVLATCVESYTHDIETFLVADAVADFGEGDHRMALEYAARCCAVVLPTKEVLG

SEQ ID NO: 92939 - protein, 89 aa, Streptomyces albidoflavus
  REGION 1..89: note = tr|A0A140G477|A0A140G477_9ACTN Isochorismatase; OS = Streptomyces albidoflavus OX=1886 GN=dhbB PE=4 SV=1
MPSALTLQQFRADLAEVLHQEPEEVDLEDSPVSAGLDSLRLVTLVERWEQHGIVVCFIDLAELPSFRHWWQLLAERHAEGREAGRRGDA

SEQ ID NO: 92940 - protein, 226 aa, Streptomyces chartreusis
  REGION 1..226: note = tr|A0A2N9BJJ9|A0A2N9BJJ9_STRCX Putative isochorismatase OS=Streptomyces chartreusis NRRL 3882; OX = 1079985 GN=phzD PE=4 SV=1
MPGIPPIEPYALPTRESLPANTAGWAPDADRAALLVHDMQRFFLAPLPADTLRRALTGNVARLRADCAARDVPVAYTAQPGGMTPEERGLLADFWGPGMSPEPEHREIADGLAPAPGDQIFTKWRYSAFHRSGLLEWLRATGRDQLIICGVYAHVGVLMTAVDAFSHGIQPFLVADATADFSEGHHRSALEYAAGRCAMVLTGSDVRASFEGSSGPVPATAPGAAQ

SEQ ID NO: 92941 - protein, 138 aa, unidentified
  source 1..138: note = Streptomyces formicae
  REGION 1..138: note = tr|A0A291Q7C3|A0A291Q7C3_9ACTN Isochorismatase; OS = Streptomyces formicae OX=1616117 GN=KY5_2603 PE=4 SV=1
MWVQHDDEGLVKGSDGWRIVPELTPEDAEPLVGKSYGDSFEDTTLEAVLSGLGVGRLVVVGAETDACVRSTLHGAFVRGYDAALVGDAHTTVDKTAWGAPPPDQVIAHTNLYWSRQSAPGRTAGTVTTKDVVFDPAGP

SEQ ID NO: 92942 - protein, 218 aa, Streptomyces fradiae
  REGION 1..218: note = tr|A0A1Y2NRU5|A0A1Y2NRU5_STRFR Putative isochorismatase OS=Streptomyces fradiae ATCC 10745 = DSM 40063 OX=1319510 GN=phzD PE=4 SV=1
MAGIPPIEPYPLPSADDLPGGTAQWTADPDRAVLLVHDMQRYFLRPFPAPLREELVGNAALLRERAVATGMPVAYTAQPGGMTDEQRGLLKDFWGPGMRVDPADREVVEPLTPGPDDRVFTKWRYSAFFRSGLLEWMRGLGRDQLVVCGVYAHVGVLMTAVDAFTHDIRPFLVADAVGDFSAAYHRLAVEYAAQRCAVVTTTGTVLAQLGAAPAGAAA

SEQ ID NO: 92943 - protein, 207 aa, Streptomyces fulvissimus
  REGION 1..207: note = tr|N0CRH4|N0CRH4_9ACTN PHZA Probable isochorismatase; OS = Streptomyces fulvissimus DSM 40593 OX=1303692; GN = SFUL_3324 PE=4 SV=1
MAGIAPIPPYPLPERGDLPDNTARWSIDPDRAVLLVHDMQRYFLQPFAPELRDPLLANAARLRDHAAAAGMPVAYTAQPGSMTPEGRGLLKDFWGPGMRAEPADREVVDELTPAPGSWMLTKWRYSAFFRTDLLERMRAAGRDQLVICGVYGHVGILATAIESFTQDIETFLIADAVGDFSLERHRMTMEYAAHRCAVVLTTKEAVG

SEQ ID NO: 92944 - protein, 225 aa, Streptomyces glaucescens
  REGION 1..225: note = tr|A0A089X6A7|A0A089X6A7_STRGA Putative isochorismatase OS=Streptomyces glaucescens OX=1907; GN = phzA PE=4 SV=1
MAGIPAIRPYPMPTREELPASDVAWTVDPDRAVLLVHDLQKYFLAAFPAGRQPVVDLVDNAARVRARCAELGVPVAYTAQPGGMSRQERGLLKDFWGPGMTPSPEHREVVDPVAPADGDWKLTKWRYSAFFKTDLLERMRATGRDQLILCGVYAHVGVLMTAVDAFTHDIQPFLVADAIADFSAEDHRMALEYAATRCAALTTTGELLTALAAPRVAVAAGRESA

SEQ ID NO: 92945 - protein, 85 aa, Streptomyces griseorubiginosus
  REGION 1..85: note = tr|A0A385ZLC7|A0A385ZLC7_9ACTN Isochorismatase; OS = Streptomyces griseorubiginosus OX=67304 GN=dhbB PE=4; SV = 1
MPEPLTLDAFLADLAEFLHQQPDEVDLDENPLDAGLDSLRITTLAERWRSAGAEVSFVELAERTSFGEWWQLLSERQAGAAHADA

SEQ ID NO: 92946 - protein, 210 aa, Streptomyces griseus
  REGION 1..210: note = tr|A0A2X2PHR2|A0A2X2PHR2_STRGR Isochorismatase; OS = Streptomyces griseus OX=1911 GN=dhbB_2 PE=4 SV=1
MALPAIAPYPMPAAGELPANRVDWTVDPARAVLLVHDLQNHFLSAYDRRAAPVPELLAHVAELKKDAARLGVPVLYTAQPGGQSAEERGLQQDFWGPGLPADEHLAAIADEVAPGTGDTVLTKWKYSGFVRTDLLERLREQGRDQIVITGVYAHIGVLMTACDAWMQDIQAFVVADAVADFSAEDHAMALRWAAGKCAVVTTARTVFEGK

SEQ ID NO: 92947 - protein, 207 aa, unidentified
  source 1..207: note = Streptomyces hundungensis
  REGION 1..207: note = tr|A0A387HHG3|A0A387HHG3_9ACTN Putative isochorismatase OS=Streptomyces hundungensis OX=1077946; GN = phzD PE=4 SV=1
MTGIPPIAPYSLPPSHALPENSVRWTVHPDRAVLLIHDMQSYFLNPFEDGMRSTLVHTVADLKKRCAALGVPVAYTAQPGSMTDEERGLLKDFWGPGMRTDEAERAIVPELEPDPEDWLSTKWRYSAFFKSELLQRMRALQRDQLIVCGVYAHIGVLSTALDAFSNDVQPFLVADALGDFSAAHHRLTLAYAARSCAMVVRSEDVLA

SEQ ID NO: 92948 - protein, 100 aa, unidentified
  source 1..100: note = Streptomyces jeddahensis
  REGION 1..100: note = tr|A0A177HIV4|A0A177HIV4_9ACTN Isochorismatase; OS = Streptomyces jeddahensis OX=1716141 GN=dhbB PE=4 SV=1
MEATESTGRDGGKTPPAGADPLTRQLLRLMAARCAQQAGPIELAVHEDLVDHDLDSIATMELISAWHRRGIEVGFPELMARPTPGHCRSPLDRRGIANAA

SEQ ID NO: 92949 - protein, 210 aa, Streptomyces laurentii
  REGION 1..210: note = tr|A0A161JVI8|A0A161JVI8_STRLU Isochorismatase; OS = Streptomyces laurentii OX=39478 GN=SLA_0848 PE=4 SV=1
MTRPDRLTGQLDPDGAVLLTVECQEGVVGKTSALPELAAAARESGALDNIARLVAGAHRAGVQVMHAVAERRPDGRGANRNARLFRAAARLPVAQHTGSAAVQIAEPIEVTEADLVVRRLHGLSPLAGTDVDALLRNLGCRTLVVTGVSANVAVPNAVFDAVNLGYEVVVPSDAIAGVPADYTAALTRHTLALVATLTTTDEVLACWRAH

SEQ ID NO: 92950 - protein, 185 aa, Streptomyces malaysiensis
  REGION 1..185: note = tr|A0A291SZI6|A0A291SZI6_9ACTN Isochorismatase family protein OS=Streptomyces malaysiensis OX=92644; GN = DNK48_12565 PE=4 SV=1
MPATTLDPNTALVLVDLQKGITGLPTVHPTAEVVERAARLAAAFRKRGLPVVLVRVVAGAPGRTEAQGSGAGGRFPADFADLVPELGQEDGDVVVTKHTWGAFHGTDLDLQLRRRGVTQVVLGGVATSIGVESTARGAYAHGYHVTLATDAMTDMDAEAHHNSVEKIFPRLGETDSTDAIIGLLG

SEQ ID NO: 92951 - protein, 76 aa, Streptomyces netropsis
  REGION 1..76: note = tr|A0A445NJC8|A0A445NJC8_STRNE Isochorismatase; OS = Streptomyces netropsis OX=55404 GN=dhbB_1 PE=4 SV=1
MALTLDRIRADVADVLGEDPADIPDDENLVDYGLDSVRIMTLVERWRRDHGTEVTFVDLAEQPAIEQWAPLLGVRA

SEQ ID NO: 92952 - protein, 127 aa, Streptomyces olivochromogenes
  REGION 1..127: note = tr|A0A250VT76|A0A250VT76_STROL Hydrolase; OS = Streptomyces olivochromogenes OX=1963 GN=SO3561_08977; PE = 4 SV=1
MTLCSFETSSGPLTPEITRTLPDTEIIDRLHINAWRNGTLRAAVEAIGRRPLLMAGLWTEVRLTFPALSATQAGYEVFAVVDASAGSSTAAHEAAIVRRCHGHRPRPHGRLGTGRQSCECGIQQQGA

SEQ ID NO: 92953 - protein, 218 aa, unidentified; identical to SEQ ID NO: 92942
  source 1..218: note = Streptomyces rubrolavendulae
  REGION 1..218: note = tr|A0A1D8GAP1|A0A1D8GAP1_9ACTN Putative isochorismatase OS=Streptomyces rubrolavendulae OX=285473; GN = phzD PE=4 SV=1

SEQ ID NO: 92954 - protein, 225 aa, Streptomyces scabiei
  REGION 1..225: note = tr|A0A117EDA5|A0A117EDA5_STRSC Putative isochorismatase OS=Streptomyces scabiei OX=1930 GN=phzD; PE = 4 SV=1
MGIPAIAAYPMPTEDELPQNTARWTVDPRRAVLLIHDMQKYFVEPFPADRPPVTELVRNVTALRERCAALGVPVAYTTQPGGMTEEQRGLLRDFWGPGMTVAREHREVVDAIRPAAGDLVLTKWRYSAFHRTRLLASMRAWKRDQLIVCGVYAHVGILMTGADAFASDIQAFLVADAVADFTPEHHRFALRYAAERCAMTPTTAAVLDRLAPAEADGRPRKEGAP

SEQ ID NO: 92955 - protein, 210 aa, Streptomyces sp.
  REGION 1..210: note = tr|G2NN37|G2NN37_STREK Isochorismatase; OS = Streptomyces sp. (strain SirexAA-E / ActE) OX=862751; GN = SACTE_6072 PE=4 SV=1
MALPAIAPYALPTGAELPANRVDWAVDPARAVLLVHDLQNHFLGAYPAGEQPLTGMLDNTARIIGQCRRAGVPVVYSAQKGGQTPEERGLQLDFWGPGAADDPTALAVPPAVAPADGDIVLTKWKYSAFVRTRLEDVLRESGRDQLVVTGVYAHIGVLMSAADAWMRDIQAFVVADAVADFSREDHDMALRYAAGRCARVVTTDTLLDEI

SEQ ID NO: 92956 - protein, 219 aa, Streptomyces thermoautotrophicus
  REGION 1..219: note = tr|A0A132MUD3|A0A132MUD3_9ACTN Isochorismatase; OS = Streptomyces thermoautotrophicus OX=1469144; GN = LI90_2489 PE=4 SV=1
MGIPAIRPYPMPTERELPENQVSWRPDPDRAALLIHDMQRYFVDFFPAGQSPRNELLANIQLIRRTAAELDMPVVYTAQPGAMTREQRGLLHDFWGPGMSDDPGHKRIVDELAPAEGDIVLTKWRYSAFHRSDLADIIRGQGRDQLIVCGVYAHVGCLMTACDAFALDIQPFLVADAVADFTPEYHRMALAYAAERCAATIFTRTLVGLLSRSGLQPVS

SEQ ID NO: 92957 - protein, 200 aa, Streptomyces venezuelae
  REGION 1..200: note = tr|F2R923|F2R923_STRVP Isochorismatase; OS = Streptomyces venezuelae (strain ATCC 10712 / CBS 650.69 / DSM 40230 / JCM 4526 / NBRC 13096 / PD 04745) OX=953739; GN = SVEN_3 197 PE=4 SV=1
MSMEIAQNAALVVIDVQKGFEEEYWGKRNNPAAEENIAALIDLWQETGRPVVFVRHDSPAGSRSPLRAGYAGNAFKDFVEERRGKGAGPELLVTKSVNSAFYGEPSLDGWLTGQDIAQIVIVGIQTNMCNETTARMAGNLGYEVLFPLDAMHTFDLEGPFGWSRSADELAQATAVSLHGGRFAEVVSTADVVAGVSAGVR

SEQ ID NO: 92958 - protein, 205 aa, unidentified
  source 1..205: note = Sulfolobus islandicus
  REGION 1..205: note = tr|C3MKD0|C3MKD0_SULIL Isochorismatase hydrolase; OS = Sul  folobus islandicus (strain L.S.2.15 / Lassen #1); OX = 429  572 GN=LS215_0275 PE=4 SV=1
MRAVNLIMKIEVPSIPEHKEVILDPTNTALIIVDMQNDFVRKNGKLSVPTAEATIPFIKRLVDKARSSNALVIYTQDWHMKDDPEFKIWGEHALAGTWGAEIIDELTPEKSDFIVKKYRYDAFFESSLDYILRVKNIKNTIITGTVANICVLHTAGSAALRWYNVIMPKDSISAITEFDYYATLRQVDFLYKGIITTADGIKFER

SEQ ID NO: 92959 - protein, 182 aa, Sulfurospirillum halorespirans
  REGION 1..182: note = tr|A0A1D7TIM5|A0A1D7TIM5_9PROT Isochorismatase family protein OS=Sulfurospirillum halorespirans DSM 13726; OX = 1193502 GN=SHALO_1092 PE=4 SV=1
MRIFAQQTAMLLVDVQERLFGHIEGHDELEKHLLVLLQGLQSLDIPIVCNQQYTKGLGETIQSIRLLLGDVEIYEKRTFSCCQNPDVMEALKALHVKRVIVAGVESHVCILQSVLDLLDAGFEVIVCADALGSRKAKDHELALLRMTQEGARVGSVESLLFELLRSADHAQFKTISNLVKAL

SEQ ID NO: 92960 - protein, 182 aa, Sulfurospirillum sp.
  REGION 1..182: note = tr|A0A290HTT3|A0A290HTT3_9PROT Isochorismatase family protein OS=Sulfurospirillum sp. JPD-1 OX=220622; GN = SJPD1_1124 PE=4 SV=1
MRLDSKQTAMLLVDVQERLFVHIHNHEQIEKHLLVLLQGLKTLEIPILCNQQYTKGLGQTISSVHSLLGKMTIYEKCTFSCYQNSEVTEALEALHVKCMIVAGVESHVCVLQSVCDLLDAGFEVIVCADAMGSRKEYDHNIALRRMEQEGASLATTESLLFELLQSAHHPQFKEISALVKTL

SEQ ID NO: 92961 - protein, 188 aa, Sulfurovum sp.
  REGION 1..188: note = tr|A6Q8S6|A6Q8S6_SULNB Isochorismatase hydrolase; OS = Sulfurovum sp. (strain NBC37-1) OX=387093 GN=SUN_0927; PE = 4 SV=1
MTKTALIIVDMQNDFVLPNAPHCIEGAVPIIPNIQKVLYTFREKLLPVFHVYREYRADGSDIEKTRLDDFLGGTKYCVPRTKGCEIIDGLSPMDGEYRIVKNRFSGFMNTELDFILRRLKIERIVVCGIQYPNCIRATIYDGIALGYDVTLVTDATAAQTEEIAQANIMDIRNIGVECISTELLIEQA

SEQ ID NO: 92962 - protein, 185 aa, unidentified
  source 1..185: note = Synergistetes bacterium
  REGION 1..185: note = tr|A0A1V6A3C0|A0A1V6A3C0_9BACT Putative isochorismatase OS=Synergistetes bacterium ADurb.Bin155; OX = 1852914 GN=phzD PE=4 SV=1
MLPFRIEPERAQLLLIDLQDKMLQAVFDREKTIRNAGILIEAARTMGVPIKFTEHYPKGLGKTIPPIMEKIPPVVLPFEKIHFSCCDEMGFDEYLRDDRRDQIIISGVVSHICVLATVMDLLSQGYPVAVAADACSSRDPDHHRMACEAITAAGALVAPVETLAYQLIRRAGTEQFKTMLPFFKA

SEQ ID NO: 92963 - protein, 188 aa, unidentified
  source 1..188: note = Syntrophaceae bacterium
  REGION 1..188: note = tr|A0A1V4X383|A0A1V4X383_9DELT Putative isochorismatase OS=Syntrophaceae bacterium PtaB.Bin038; OX = 1811716 GN=phzD PE=4 SV=1
MKPAVVIVDMLRDTLEGAHPMPIKELGREIVPAINRLTAFARGRSIPVIFSMDSFLPGDFIFQGRMKNHSIRGTKGAEVTDLLTQAGTDIYLPKRRFSAFYKTDLDQTLRLYGADTVALCGIATHWCVLSSAFDALSNDFRAVILEDCCASFSREMHASCLEIYRKNPLYPLLRVMTLDAFLAEVPEA

SEQ ID NO: 92964 - protein, 233 aa, Syntrophorhabdus sp.
  REGION 1..233: note = tr|A0A1V4WCA5|A0A1V4WCA5_9DELT Isochorismatase; OS = Syntrophorhabdus sp. PtaB.Bin027 OX=1811699 GN=entB; PE = 4 SV=1
MKEQRSQQIRDEGNKEKHEITCRGKSNNITGNNDSKRGRTVKPAIIVVDMLLDNLGLERKGKGEEEKIIKPVAAFLKECRQLSVPVIFACDSFLKDDFIFQGRMKPHAIRGTDGTKPLPDLEPQPSDIILEKRRFSAFFKTDLDQTLRTMHVDTVAVGGINTHFCVLATAFDAVCHDFTTIILEDLSAAYKREIHQSFIDTYRYSAIYPILRVMKSKEFLSEYRDLRDLGIGD

SEQ ID NO: 92965 - protein, 179 aa, Syntrophus sp.
  REGION 1..179: note = tr|A0A1V4XF22|A0A1V4XF22_9DELT Vibriobactin-specific isochorismatase OS=Syntrophus sp. PtaB.Bin001 OX=1811710; GN = vibB PE=4 SV=1
MLTAENTILAVIDFQGNLAQAMADRNSLFDNAKKIIRGMKVLEIPLIVTEQIPAKLGPTIPEIAVLLEGVLPIAKESFSCCQNEFFMDTLKATGRKSILVAGIETHICVYQTALDLLAAGYEVHIISDAVSSRTAQNREIGLHLIRNAGGALTCTEAVLFELLRTAAHEKFKDIANIVK

SEQ ID NO: 92966 - protein, 284 aa, Tatumella ptyseos
  REGION 1..284: note = tr|A0A085JQA3|A0A085JQA3_9GAMM Isochorismatase; OS = Tatumella ptyseos ATCC 33301 OX=1005995 GN=entB PE=4; SV = 1
MSIPKPESYRLPTADELPDNKVKWAFEPGRAALLIHDMQNYFLRFWEEDSALVREVIGNIARLRTQCKALGIPVFYTAQPAEQSEKDRALLNDMWGPGLNRHPEQQRVVDGLTPEADDIVLTKWRYSAFQRSPLEQQLHDMGRDQLIITGVYAHIGCLTTATDAFMRDIKPFMVADALADFTREEHMMALKYTAGRCGKVVRCEDLLILPESKAALRMLVLPLLEDDDIPEDDENLIDYGLDSVRMMALAGRWRQAVPAIDFVALAKNASIDGWWALLSQGKTQ

SEQ ID NO: 92967 - protein, 292 aa, Teredinibacter turnerae
  REGION 1..292: note = tr|C5BUB8|C5BUB8_TERTT Isochorismatase; OS = Teredinibacter turnerae (strain ATCC 39867 / T7901); OX = 377629 GN=dhbB PE=4 SV=1
MSIPQINSYPLPAASQLPTNRVNWPLDTSRAAVLVHDMQNYFARYYGDNNPLLEKVIENIALILNWARAQGLPIIYTAQPSEQPPAQRALLNDMWGPGLTDATPELQNIIPALAPQPGDTTLVKWRYSAFQRTHLQDLLQEGKRDQLIIVGIYAHIGCLTTALDAFMRDIKPFFIADAVADFTEDDHRMSLDYVAGRCGQVMSCGQVISTGTSDNPSLTRESLQQQLLTLIDETELDFDPDENLVDYGLDSVQVMQLIGEWKKHGLDFHFEELARQPTFNSWWQLIESKRAA

SEQ ID NO: 92968 - protein, 172 aa, Tetrasphaera australiensis
  REGION 1..172: note = tr|W6JZD1|W6JZD1_9MICO Isochorismatase hydrolase; OS = Tetrasphaera australiensis Ben110 OX=1193182 GN=dhbB; PE = 4 SV=1
MSRNVSVRSDIALVAIDLMERVVMAPARPHSGLDVVTRTIVLAEALRAKGGHVVWVRSERPTPTQPPGSDLVPLARPQPEDLIVVKRTWGAFTATGLHERLQARGVTTLWLTGIATSNGVESTGRAADELGYRLVFVEDAMTAPVEGEHEHSVSVIFPRLGNVVRHSQLIGD

SEQ ID NO: 92969 - protein, 299 aa, Tetrasphaera japonica
  REGION 1..299: note = tr|A0A077LV68|A0A077LV68_9MICO Isochorismatase (Modular protein) OS=Tetrasphaera japonica T1-X7; OX = 1194083 GN=BN12_1370005 PE=4 SV=1
MPLPHLIDYPAPLTDLPESQATWSLEPERAAVLVHDLQRYFLRPFAPGSPVVEAMLTHTAAILRAARSAGIPVLYTAQDGDQDPAERGLQGDLWGRGMRADPEHTAIVDEVAPTGSDTVLPKHRYSAFARSDLADRLGRAGRGQLVITGVYAHIGILATVFDAFQREVQPFVVADAVADFGAAEHRRALCQVASCCGVVTTTDDVLARFGRPADVDGVDETDPWDARIRAALGGLLAGDAIEELFARPDADAFELGLDSLRAFEFLDLLADEGLDVDFGEFTRTPTLDWLRRQARSVGV

SEQ ID NO: 92970 - protein, 181 aa, Thauera aromatica
  REGION 1..181: note = tr|A0A2R4BLW3|A0A2R4BLW3_THAAR Isochorismatase; OS = Thauera aromatica K172 OX=44139 GN=Tharo_1324 PE=4 SV=1
MMLMNRDKSVLLVIDVQARLAPHIHDREQVVANCIWLARVAERAGVPVVVTEHFPEKLGATVDELRAATGNARYVGKRCFSAQAEGGLADTAVERCRQVIVCGTEAHVCVMQSALELRWAGKEVFVVAEASGSRAAADRDLAFARMREHGVEIVSREMVAFEWLQRGGTELFREINRDFIR

SEQ ID NO: 92971 - protein, 181 aa, Thauera chlorobenzoica
  REGION 1..181: note = tr|A0A1H5S1Y1|A0A1H5S1Y1_9RHOO Isochorismatase; OS = Thauera chlorobenzoica OX=96773 GN=Tchl_2165 PE=4 SV=1
MMLMNRDKSVLLIIDVQTRLAPHIHDHRQVLANCIWLAQVAERAGVPVVVTEHFPEKLGATVDEVRAVTASARYVGKRCFSAQAEGGLADTAVEARRQVIVCGTEAHVCVLQTALELRWAGKEVFVAAEASGSRDPAARDLAFTRMRGHGIEIVSREMVAFEWLQRGGTELFRQINRDFIR

SEQ ID NO: 92972 - protein, 221 aa, Thermobifida fusca
  REGION 1..221: note = tr|Q47NR6|Q47NR6_THEFY Isochorismatase; OS = Thermobifida fusca (strain YX) OX=269800 GN=Tfu_1870; PE = 4 SV=1
MSLPAITPYPLPTVDQLPANRAEWQITPARAVLLVHDMQRYFLRPYAESADPLRGVLTNISTLADTCRTLGIPVIYTVKPGGMDPAQRGLELHFWGRGMSATDEHTAIDTRIAPRPTDLVVVKARYSAFVGTDLAARLADLNRDQIIVTGVYAHIGCLLTAADAFMRDIQPFLVADATADFSAEEHRFALTYAATRCAMVTSTADALAALRSARVDVETGG

SEQ ID NO: 92973 - protein, 201 aa, unidentified
  source 1..201: note = Thermogutta terrifontis
  REGION 1..201: note = tr|A0A286RJV2|A0A286RJV2_9PLAN Isochorismatase; OS = Thermogutta terrifontis OX=1331910 GN=THTE_3636 PE=4; SV = 1
MSEPTRIPPRSPELMSPQDTGLLVIDVQEKLVPHIHDHQKVVWNIRRLLDAARILGIRILATEQYPKGLGPTVSPLRERLGPIPEKLMFSCRECWSLFEEAEQAGLSRLLVCGIETHVCVQQTVLDFLASGWRVYVAADAVGSRHRIDYEIALRRMELAGAVITTTEAALFEWCIRAGTAEFKQISQLAREFPPGESAAVS

SEQ ID NO: 92974 - protein, 189 aa, Thermomicrobium roseum
  REGION 1..189: note = tr|B9L582|B9L582_THERP Isochorismatase (2,3 dihydro-2,3 dihydroxybenzoatesynthase) (Superoxide-inducible protein 1) (SOI1) OS=Thermomicrobium roseum (strain ATCC 275 02 / DSM 5159 / P-2) OX=309801; GN = trd_A0009 PE=4
MKAAVLVIDMLNDFVTGKLGNERVRSVIDPLQHLLERARASGVPVVYIGDAHLPSDPEMAVWGPHAMKGTKEAETIPELAPQPGDTVLEKRTYSAFYETGLDLLLRSLGVDTVVITGLHTNICCRHTAADAFTHGYKIIVPEDCVNAFTEEEHREGIAYLRRVYGARITTSEELAREWEREPQTAATKA

SEQ ID NO: 92975 - protein, 204 aa, Thermoproteus tenax
  REGION 1..204: note = tr|G4RKK2|G4RKK2_THETK Isochorismatase; OS = Thermoproteus tenax (strain ATCC 35583 / DSM 2078 / JCM 9277 / NBRC 100435 / Kra 1) OX=768679 GN=entB PE=4 SV=1
MLPEVVKVPHIPIMDKVSFPSRSTAVLVVDMQNDFAHPNGKLYSPSSGEIIPRIARLLERARSSGVRIIYTQDTHPPDDPVEFPIWGPHVVKGSWGWQIVDQLKPTEGDIVVEKMRYDPFFGTPLDHILRMYGISNLVVVGTVANICVLHAVAGARLRLYNVAVPIDGIAALNDFDYVAALRQMDYLYKAVLTTIDGVVFEEKT

SEQ ID NO: 92976 - protein, 183 aa, unidentified
  source 1..183: note = Thermosulfurimonas dismutans
  REGION 1..183: note = tr|A0A179D6E9|A0A179D6E9_9BACT Isochorismatase; OS = Thermosulfurimonas dismutans OX=999894 GN=TDIS_0203; PE = 4 SV=1
MFIKPQDSFLMVIDPQERLLNAIYQPERVVKNIILLIKASQEFGVPVVPTTQYRKGLGDYLPEIKDALGEIEPLDKIEFSAFKNQVIAEEVQRLSRQTVILCGVETHICVYQTALSALEKGFRVVVVGDATSSRSPENISYGLSRMRELGVAVVSTEMLIYEWLEKAGTPAFKALLPYFKNKN

SEQ ID NO: 92977 - protein, 229 aa, Thiomonas sp.
  REGION 1..229: note = tr|A0A078BID9|A0A078BID9_9BURK Putative Isochorismatase hydrolase OS=Thiomonas sp. CB2 OX=554131; GN = THICB2_370005 PE=4 SV=1
MSASETTLMTLRVRARPGPFACDLRNTALVLIDMQRDFIEPGGFGETLGNDVGQLAQAVEPAARLLAWARTYGLLVVHTRESHAPDLSDCPPAKRCRGEPSLRIGDMGPMGRVLVRGEPGNAIIDALQPIAGEVELDKPGKGAFYDTGLQEILQRRAITHLIFGGVTTEVCVQTSMREANDRGYDCLLVEEATASYFPYFKQATLEMIAAQGGIVGWTCKLDAVLRGVS

SEQ ID NO: 92978 - protein, 177 aa, Trabulsiella guamensis
  REGION 1..177: note = tr|A0A085AE33|A0A085AE33_9ENTR Isochorismatase; OS = Trabulsiella guamensis ATCC 49490 OX=1005994; GN = GTGU_01395 PE=4 SV=1
MVEKRAVMVVDMQNGVFATPRLQPERCVAQINRLTRVADTVIFIQHAQAGGLEEGSEGFALLPDLWQPDNALYITKTACDAFYRTTLADELAAHDIHAFVVCGCATDYCVDTTIRNGASRGYAITVAEDAHTTANRPAAPAETLIAHHNDVWRDLIVPDNPVYVKPVETILQEWLTN

SEQ ID NO: 92979 - protein, 260 aa, Tsukamurella paurometabola
  REGION 1..260: note = tr|D5UPZ9|D5UPZ9_TSUPD Isochorismatase; OS = Tsukamurella paurometabola (strain ATCC 8368 / DSM 20162 / JCM 10117 / NBRC 16120 / NCTC 13040) OX=521096; GN = Tpau_0113 PE=4SV=1
MENPASEVPSVTESHPQEAVSTAEVLGRRRLFQAAAWGTVGAVAVGGARAGTADAAVALPGSVSYRIGEIPIPRNKVAWQLDPRRAVLLVHDVQRYFMRIFDERTRGELLGNVARGQDWARRSGVPVIYSAQRGGATREQRGLIYDFSGAGMTADESDRGIEPAVAPRPGERVLTKHKLSEYFRSDLLQYLRDQGRDQLVLAGVYANTGVLLTAADSIQNDIQAFVIGDAVADQTPEGHRGGLAWVAARAGRVISAAELR

SEQ ID NO: 92980 - protein, 176 aa, unidentified
  source 1..176: note = Unknown
  REGION 1..176: note = tr|V4J5N2|V4J5N2_9CREN Amidases related to nicotinamidase OS=uncultured Acidilobus sp. CIS OX=1410574; GN = CISAcid_17510 PE=4 SV=1
MRPALVIIDMLNDFVHGALKTPEAASTVEPARRVLEHFRSRGWPVIYVNDSHYSTDIEMPLWGPHAMKGTWGAQVVPELAPREGEYVLEKHAYSGFYGTPLDHILRSLGVDTVVLVGLDADICVRHTAADAFFRGYRVVVVRDAVAARIDKNWEEYYRRVYGATIVSSDELPKVLG

SEQ ID NO: 92981 - protein, 182 aa, unidentified
  source 1..182: note = Unknown
  REGION 1..182: note = tr|A0A212JH90|A0A212JH90_9PROT Isochorismatase hydrolase OS=uncultured Alphaproteobacteria bacterium; OX = 91750 GN=KL86APRO_11056 PE=4 SV=1
MRLSASRSCLVVIDVQERLAPVMGDPRKVIDGAARLAAAARRLGVPTLISEQYPKGLGPTMIDVREVVAEADAYVPKLDFSCCGEPAFMAKFEAFDRRQVAICGIEMHVCVMQTALDLKDKGYDVFVVADACGSRNAADEEIAKLRFAAAGIPLVSIEMVIFEWLERSGTPEFKEISKTLIR

SEQ ID NO: 92982 - protein, 179 aa, unidentified; identical to SEQ ID NO: 92680
  source 1..179: note = Unknown
  REGION 1..179: note = tr|Q5NW14|Q5NW14_9ARCH Isochorismatase OS=uncultured archaeon OX=115547 GN=orf27 PE=4 SV=1

SEQ ID NO: 92983 - protein, 77 aa, unidentified
  source 1..77: note = Unknown
  REGION 1..77: note = tr|S5UCC8|S5UCC8_9BACT Isochorismatase [enterobactin] siderophore OS=uncultured bacterium esnapd10 OX=1366590 PE=4 SV=1
MSEIPGTKEELRALIAEKLEIDPGEIADDDDLIEWGLNSVTTMGLAGRWRRAGLDVDAKTLVRNVTVNGWWALLAAA

SEQ ID NO: 92984 - protein, 285 aa, unidentified
  source 1..285: note = Unknown
  REGION 1..285: note = tr|A0A212I5X8|A0A212I5X8_9ENTR Isochorismatase; OS = uncultured Citrobacter sp. OX=200446 GN=entB PE=4 SV=1
MAIPKLQAYALPTALDIPVNKVDWAFDPERAALLIHDMQDYFIGFWGDNCPMMEQVVANIAALRQYCKEHNIPVYYTAQPKEQSDEDRALLNDMWGPGLTRSPEQQKIVEALAPDEADTILVKWRYSAFHRSPLEQMLKETGRNQLIITGVYAHIGCMTTATDAFMRDIKPFMVADALADFSRDEHLMSLKYVAGRSGRVVMTQELLPTPVPASKDALRSVILPLLDESEEPMDDENLIDYGLDSVRMMALAARWRKVHGDIDFVMLAKKPTIDAWWALLSREVK

SEQ ID NO: 92985 - protein, 193 aa, unidentified
  source 1..193: note = Unknown
  REGION 1..193: note = tr|A0A1C5MAC6|A0A1C5MAC6_9CLOT Isochorismatase; OS = uncultured Clostridium sp. OX=59620 GN=dhbB PE=4 SV=1
MDQTAKTIQDLLLVIDMQNVYTKDQEWACEGIEKASASILRLLNSRALSQVIFTQYLATKHPEGVWKEYNKVNAAVNADPWLNEMMSEFLPYTKKYPVYTKSVYSSFVIPQVRELAKHASRIVISGVVAECCVLSTALSAIDAGCKVIYLTDAVAGLNAVSQKEAENILSYLSPLHTKLMTTQQYLDSLLQEE

SEQ ID NO: 92986 - protein, 125 aa, unidentified
  source 1..125: note = Unknown
  REGION 1..125: note = tr|A0A483A4S5|A0A483A4S5_9GAMM Isochorismatase; OS = uncultured SUP05 cluster bacterium OX=655186; GN = CRYPD_456 PE=4 SV=1
MNKNDNTVILEAINIASTKWKNAFNSGDATGCAAQYEEKAIMNAKPFGAYTGAVEIQAFWQKLIDGGFSDIDYINPEIKVIDENSAILTSNWKMNKAHGMITKELWVLQSDGTAKLREDDFEAQD

SEQ ID NO: 92987 - protein, 215 aa, Variovorax sp.
  REGION 1..215: note = tr|A0A109BKV3|A0A109BKV3_9BURK Isochorismatase; OS = Variovorax sp. WDL1 OX=207745 GN=APY03_6685 PE=4 SV=1
MLPEDPAWAGRNQHPDSQRSSRMNSSPLKEGLHIMNKRATIVVDLQNEYLPDGKLPLVGLDAALANAARVIAAARAHGELLIHVRHESAQPDAPVFTPGTIGVQIIPAVAAEAGEPVIVKNHPNSFRGTQLKELLDAQGVKELVVIGAMSHMCIEATSRAAADFGYPVTVAHDACATMNLEFDGTAVPAAQVHAASMAALSFGYASITSTDKHLA

SEQ ID NO: 92988 - protein, 173 aa, Veillonella parvula
  REGION 1..173: note = tr|T0TA67|T0TA67_9FIRM Isochorismatase; OS = Veillonella parvula HSIVP1 OX=1316254 GN=HSIVP1_892; PE = 4 SV=1
MAQALIVIDIQEGLVKESPYDAKNLIANTKAIIQHFRDQNIEVIFIRHSEDEGLLATGSDNWQVYHELNPQENEKIFNKYYNSIFKDSELKEYLDSKSITDLTFVGMQVEFCIDTSVKVGFEYGYKITIVEDAISTFDNDHLSADTILSFYKEKIWRNRFAQLKTTNEMLSIN

SEQ ID NO: 92989 - protein, 185 aa, unidentified
  source 1..185: note = Verrucomicrobia bacterium
  REGION 1..185: note = tr|A0A1V6JX34|A0A1V6JX34_9BACT Putative isochorismatase OS=Verrucomicrobia bacterium ADurb.Bin006; OX = 1852924 GN=phzD PE=4 SV=1
MSQTSWRLDRTATGVLVVDIQERLLPAIFERDRVVSETLCLIRGASVLGVPLFATEQYRKGLGPTVPEVAEAIPGFAPFEKLAFSACGAPGLIDAMRARAIKDVIVCGIEAHVCVCQTALDLLEHGFRPFVIADAVSSRTPENRRLGLDRMRQAGAVIASNEMALFELLDKAGTDDFKAILSLVR

SEQ ID NO: 92990 - protein, 190 aa, unidentified
  source 1..190: note = Verticillium dahliae
  REGION 1..190: note = sp|G2X4M1|ISC1_VERDV Secreted isochorismatase effector Isc1 OS=Verticillium dahliae (strain VdLs.17 / ATCC MYA-4575 / FGSC 10137) OX=498257 GN=Isc1 PE=1 SV=1
MSSFRSMLGVPPSTASTQDSVLVIIDAQGEYAEGKLKISNIEASRPNISSLLEKYRAANAPIVHVVHETPAGAPLFTQGTKLAEIFDELTPKEGEAVVTKHHPGSFADTNLQEILEKSGKKKIVLVGYMAHVCVSTTARQGAQRGWDVIVAEDAVGDRDIPGVDAAQLVKVALAEIADVFGTLVSSKDIN

SEQ ID NO: 92991 - protein, 300 aa, Vibrio aerogenes
  REGION 1..300: note = tr|A0A1M5VUV8|A0A1M5VUV8_9VIBR Vibriobactin-specific isochorismatase OS=Vibrio aerogenes CECT 7868 OX=1216006; GN = vibB PE=4 SV=1
MSIPKIASYELPDSEHFPQNKVNWQVEPQNAVLLIHDMQCYFMNFFDTDAAPVPKLKQNIQSLAKAAREAGIPVIYTAQPVNQDPEERALLTDFWGQGLTCDAEIISELTPEQNDICLTKWRYSAFRKNELHEYMRSHGRNQIIICGVYGHIGILSTTLEAFMLDIKPFVVGDAIADFSAEEHEWTMKYVTGRAGAVKSLQTVLDEISVRPDAIVPAGLTLDRMKHDIAQVLEISIDELDETENLLFYGLDSVRAMTLLEKWQQQGTTITFAQLMEKVTLQEWWQLIEDQAAMTPAGCAA

SEQ ID NO: 92992 - protein, 307 aa, Vibrio anguillarum
  REGION 1..307: note = tr|A0A378MRF3|A0A378MRF3_VIBAN Isochorismatase; OS = Vibrio anguillarum OX=55601 GN=dhbB PE=4 SV=1
MAIPKIASYSIPLAETFPKNKVHWHVQADRAVLLIHDMQKYFINFFDHSQAPVPELLANISELKSLARQANIPVVYTAQPPNQDPVERALLTDFWGTGLTKDTEIVSELSPEDGDIQYTKWRYSAFKKTPLLEWMKETQRDQLIIVGVYAHIGILSTALDAFMLDIQPFVVGDAVADFSLEDHHHTLKYITERVGCVTSLEALKPQMIHSQETRLLSLEQMRQQVAELLDLDLDEVDVDEKLTFLGLDSIRAVTLFESWRKMGIECAFSEMIKYSTLREWWHVMEPSVVAQSSHQVTDTRSTEEQPV

SEQ ID NO: 92993 - protein, 288 aa, Vibrio campbellii
  REGION 1..288: note = tr|A0A1Q1PAA3|A0A1Q1PAA3_9VIBR Vibriobactin-specific isochorismatase OS=Vibrio campbellii OX=680 GN=vibB PE=4; SV = 1
MAIPKIASYKIPQSETFPENTVDWKTDPKKAVVLVHDLQTYFLNFFDKTKSPVPELLENVRQVLDNARAANIPVIYTAQPANQEPNERALLTDFWGAGLTQDTDIAPEVSPQAGDIQYTKWRYSAFKKTPLLQWMQEEQRDQLIIVGVYGHIGILSTALDAFMLDIKPFVIGDAIADFSEEDHLHTLKYVAGRSGCVKSVNEFIKTMKPSDSSSALSLESMRKDVADILDVDLDEVDVDENLIFLGLDSIRVMTLHSRWKALGFNVELAEMVALHTIKDWWEATQVTA

SEQ ID NO: 92994 - protein, 293 aa, Vibrio cholerae
  REGION 1..293: note = tr|A0A0H3PWA1|A0A0H3PWA1_VIBCL Isochorismatase of siderophore biosynthesis OS=Vibrio cholerae B33 OX=417400; GN = VCE_002120 PE=4 SV=1
MAIPKIASYPLPVSLPTNKVDWRIDASRAVLLIHDMQEYFVHYFDSQAEPIPSLIKHIQQLKAHAKQAGIPVVYTAQPANQDPAERALLSDFWGPGLSEETAIIAPLAPESGDVQLTKWRYSAFKKSPLLDWLRETGRDQLIITGVYAHIGILSTALDAFMFDIQPFVIGDGVADFSLSDHEFSLRYISGRTGAVKSTQQACLEIAAQHSKLTGLSLRTMQHDVAAALNLSVDEVDVQENLLFLGLDSIRAIQLLEKWKAQGADISFAQLMEHVTLQQWWQTIQANLHQPCSA

SEQ ID NO: 92995 - protein, 295 aa, Vibrio fluvialis
  REGION 1..295: note = tr|A0A1L9L0H2|A0A1L9L0H2_VIBFL Vibriobactin-specific isochorismatase OS=Vibrio fluvialis OX=676 GN=vibB PE=4; SV = 1
MGIPKIAGYPLPTPAEFPDNRTGWTIDPDQAVLLIHDMQEYFVNYYQPDSSPVVDIIQHIQRLKAAAKKAGIPVIYTAQPANQHPTDRALLTDFWGPGLNGDHVPIVEALSPEEGDIEYVKWRYSAFKKTPLLEFMRAQGKSQLIISGIYGHIGILSTTLDAFMLDVQPFVIGDAIADFTREDHLRTLQYVASRSGSVKRLDEALDEIRSQKPLTLEQIQQDVATSLGIQPDEVDLDEDLMFVGLDSMRAMVLVEKWHQQGENISFGQLMEAASLREWWLVIEQARNEEQTMAVA

SEQ ID NO: 92996 - protein, 296 aa, Vibrio harveyi
  REGION 1..296: note = tr|A0A454CNW3|A0A454CNW3_VIBHA Isochorismatase; OS = Vibrio harveyi OX=669 GN=dhbB PE=4 SV=1
MAIPSISGYSLTKVKPENRVNWSVEPHRAVLLIHDMQQYFLNFYDADSELIQTLTRNIQEIKQACIDAGIPVVYTAQPGDQRQEDRALLTDFWGPGLKADDNITRISPALAPTEQDTVYTKWRYSAFQRTPLKSMMDETGRDQLIIVGIYAHIGCLQTAAEAFMTDIKAFMVSDAVADFSASDHDMALNYVAGRCGYVLDKQQLLEQVASANELAAGDFVIPQSQPQLTQQLAALLEVAADEMTPEDSLLDFGLDSVRMMSLVGDWQQAGLDVSFMELAAKPSLQDWWRLIEKKLT

SEQ ID NO: 92997 - protein, 183 aa, unidentified
  source 1..183: note = Vibrio ishigakensis
  REGION 1..183: note = tr|A0A0B8QK62|A0A0B8QK62_9VIBR Isochorismatase; OS = Vibrio ishigakensis OX=1481914 GN=JCM19241_6058 PE=4; SV = 1
MVENNTVANMELLMNTAVAEGFPLVISPHYYFPTDHKWKFEGTLEKLMHAINMFDRKSALDVEGFEGSGADWMEQFKPAINDENTVICGAHKVYGPENNDLILQLQKLRIEKVILAGMSANLCVESHLRELVERGFEVAVVADATAAAKVPGLDGMLSALTNYRMIASDIFTAKEIVEKMKAK

SEQ ID NO: 92998 - protein, 107 aa, Vibrio kanaloae
  REGION 1..107: note = tr|A0A0H3ZIG4|A0A0H3ZIG4_9VIBR Isochorismatase; OS = Vibrio kanaloae OX=170673 PE=4 SV=1
MAIPKIASYQVLPLESFPTNKVDWVIDPKKSVVLVHDLQAYFLNFFDKALSPVPELLRNVNKVTESARSAGIPVVYTAQPANQDPNERALLTDFLGGWTDTRYRDST

SEQ ID NO: 92999 - protein, 302 aa, Vibrio mangrovi
  REGION 1..302: note = tr|A0A1Y6IWS5|A0A1Y6IWS5_9VIBR Isochorismatase; OS = Vibrio mangrovi OX=474394 GN=entB PE=4 SV=1
MTIARLTDYSLPQLSELPLGKVDWKLDNSRAALLIHDMQDYFVNFWPQDSQLITQVIHNLVTIRTYCRANGIPVFYTAQPARQHDEERGLLNDMWGQGLPKAPEQKNIVAALTPEHDDVVLTKWRYSAFFRSDLAEQMADLGRDQLIIGGVYAHIGCLTTANEAFMRNIQPFMVSDALADFSRDEHLMALHYTLGRCGRVVDTQEVVTAITTAEAQSEGLPASFAALRHEILPLLDDEDADEIENDDNLIDYGLDSIHIMNLASRWNPLAPQINFMELAKTPTLHHWWQLMQKQVTTTGEAA

SEQ ID NO: 93000 - protein, 123 aa, Vibrio maritimus
  REGION 1..123: note = tr|A0A090S2Y3|A0A090S2Y3_9VIBR Isochorismatase; OS = Vibrio maritimus OX=990268 GN=JCM19235_448 PE=4 SV=1
MSESVLEQSKAGISGWQSAFNSQDAAGCAARYAEDAVMVAKPFGTFEGREAIEAFWQGIMDQGFADVDYTNVKWVKENDTGYILSADWTMNKAFGVVHKELWEIQEDGLSRLTYDEFEVLGER

SEQ ID NO: 93001 - protein, 294 aa, Vibrio metschnikovii
  REGION 1..294: note = tr|C9P809|C9P809_VIBME Isochorismatase of siderophore biosynthesis OS=Vibrio metschnikovii CIP 69.14; OX = 675813 GN=VIB_002651 PE=4 SV=1
MAIPKIAAYHIPSSDSFPANKVNWQLDAKKAVLLVHDMQNYFINFFDRAEAPIPELIKNIQLIKQAAGLANIPVVYTAQPANQDPEERALLTDFWGTGLTQDTEIISDVAPKEEDITYTKWRYSAFKKTPLLEWMNETGRDQLIIVGVYAHIGILSTALDAFMLDIKPFVVGDAVADFSLAEHQQMLAYITGRAGSVKSTQRVIEEIHHSIQFVAPLSLEVMQKDIAEMLDLDIEDVDVDENLILIGLDSIRAMRLFEGWRNQGANIAFSEIIKKVTLREWWQTIEKAKNYEIA

SEQ ID NO: 93002 - protein, 297 aa, Vibrio nigripulchritudo
  REGION 1..297: note = tr|U4DYM2|U4DYM2_9VIBR Vibriobactin-specific isochorismatase OS=Vibrio nigripulchritudo FTn2 OX=1238441; GN = vibB PE=4 SV=1
MAIPKIASYDLPEHKEFPENRTNWKINPSDAVLLIHDMQEYFVNYYEVNASPMADILKNIQELKKKAKEAGIAVVYTAQPANQDPKERALLTDFWGPGLNGDHTPVVSVLSPEEDDIEYVKWRYSAFKKTPLLDYLQANGKTQLIISGIYGHIGILSTALDAFMLDIQPFIVGDAIADFSREDHIHTLNYVAGRAGSIKTLDEIVEEIKSSECPALSLDILQSDVAETLGVSAEDIDVNENLMFMGLDSMRAMTLVEKWNKQGANVSFSQLIEAVSLQEWWQTIQATANNKKEEVSA

SEQ ID NO: 93003 - protein, 294 aa, unidentified
  source 1..294: note = Vibrio palustris
  REGION 1..294: note = tr|A0A1R4B877|A0A1R4B877_9VIBR Isochorismatase; OS = Vibrio palustris OX=1918946 GN=entB PE=4 SV=1
MSIPKLNSYSLDNLLDGITNKVSWNLDANRAVLLIHDMQQYFLDFYADDALKARLIQTVSEIKAACKAQGIPVVYTAQPGDQAPQDRALLTDFWGTGLKASDQVTRIVPELAPDTDDTVLTKWRYSAFKRSPLLETMQEQQRDQLIIVGVYAHIGCMLTAADAFMYDVQAFFVADGLGDFSREDHIDALQYVAKRCGYVTNQADILQCIQEQQSVATLPTSKAQLKSLIAQLIEIEENDIYNDDNLLDLGLDSVRAMMLLGRLQNAGLNTSFAEFASAPSIDGWWQLIEPQIAA

SEQ ID NO: 93004 - protein, 127 aa, Vibrio ponticus
  REGION 1..127: note = tr|A0A090P9G2|A0A090P9G2_9VIBR Isochorismatase; OS = Vibrio ponticus OX=265668 GN=JCM19238_4518 PE=4 SV=1
MNTIEQNAVLEACKQGIKAWQTAFNQQDAQGCAAQYQESCTMHARPFGEFTGREAIQAFWQDIMDKGFKDVDYTEVEWQPHGDDAFILSAKWTMNQAFGVVHKEVWQIDVDGKARLASDDFEVLGER

SEQ ID NO: 93005 - protein, 298 aa, unidentified
  source 1..298: note = Vibrio quintilis
  REGION 1..298: note = tr|A0A1M7YXX8|A0A1M7YXX8_9VIBR Vibriobactin-specific isochorismatase OS=Vibrio quintilis OX=1117707 GN=vibB; PE = 4 SV=1
MAIPKIASYDLPDSGLFPQNKVNWQIQPQRAVLLIHDMQSYFLNFFNPDAAPVPELKRNISALKDAAHQAGIPVIYTAQPVNQDPEERALLTDFWGSGLTGDAEIVPELSPDQDDICLTKWRYSAFKKNELQDYMQIHGKDQIIICGVYGHIGILSTALEAFMLDIQPFIIGDAIADFSAGEHEWALKYVAGRAGSVKSLQTALGEISSADKASSGLTLDTMQHDIAQVLEIAIDEVDVTENLLFLGLDSVRAMTLLEKWQQQGATITFAQLMEKVTLQEWWQLIDQQAVTTQASHAA

SEQ ID NO: 93006 - protein, 294 aa, Vibrio ruber
  REGION 1..294: note = tr|A0A1R4LTW5|A0A1R4LTW5_9VIBR Vibriobactin-specific isochorismatase OS=Vibrio ruber DSM 16370 OX=1123498; GN = vibB PE=4 SV=1
MAIPKIAAYQIPSHDAFPDNKVNWQLDAKKAVLLIHDMQDYFINFFDKKEAPIPELIKHIQAIKQAAGEAGVPTVYTAQPANQDPQERALLTDFWGTGLTQDTAIITDVAPQDNDITYTKWRYSAFKKTPLLEWMNETGRDQLIIVGVYAHIGILSTALDAFMLDIQPFVVGDAVADFSLADHQYALAYVTGRAGSVKSAQRVIEEINQSAQSAAAISLEMMQKDVAQILDLDIEDIDVDENLMLLGLDSIRAMSLFEGWRKHGVNIAFAEIVKKVTLREWWHLIDNAQTQQVA

SEQ ID NO: 93007 - protein, 285 aa, Vibrio sp.
  REGION 1..285: note = tr|A0A0H3ZPM4|A0A0H3ZPM4_9VIBR Isochorismatase; OS = Vibrio sp. 1S_269 OX=1652828 PE=4 SV=1
MAIPKIASYQVLPLESFPTNKVDWVIDPKKSVVLVHDLQAYFLNFFDKALSPVPELLRNVNKVTESARSAGIPVVYTAQPANQDPNERALLTDFWGAGLTQDTEIVPEVSPQPEDIQYTKWRYSAFKKTPLLEWMKEEQRDQLIIVGVYGHIGILSTALDAFMLDIKPFVIGDAIADFSKEDHLNTLKYVAGRSGSVKSVDEFIESVTPCSSSGELSLESMRQDVANILDVDLDEVDVDENLIFLGLDSIRVMTLHSRWKKEVLILILLRWSGKIRLKIGGILFR

SEQ ID NO: 93008 - protein, 294 aa, unidentified
  source 1..294: note = Vibrio spartinae
  REGION 1..294: note = tr|A0A1N6M7L3|A0A1N6M7L3_9VIBR Vibriobactin-specific isochorismatase OS=Vibrio spartinae OX=1918945 GN=vibB; PE = 4 SV=1
MAIPKIAAYPIPTSDSFPVNKVNWQLDAKRAVLLIHDMQDYFINFFDKKAEPVPALIQHIQSIKQAASTAGIPVVYTAQPANQDPQERALLTDFWGTGLTQDTAILTDVAPQDNDTTYTKWRYSAFKKTPLLEWMNDTGRDQLIIVGVYAHIGVLSTALDAFMLDIQPFVVGDAVADFSLADHQYALQFITGRAGSVKSAQRVIDEIQQSASSVTSLDLDIMQQDVAEILDLDIEDIDVDENLMLLGLDSIRAMSLFEKWRKHGVDVTFSEVIQQVTLRSWWQTMEAAQARAVA

SEQ ID NO: 93009 - protein, 304 aa, Vibrio tapetis
  REGION 1..304: note = tr|A0A2N8ZM74|A0A2N8ZM74_9VIBR Isochorismatase; OS = Vibrio tapetis subsp. tapetis OX=1671868 GN=entB PE=4; SV = 1
MAIPSIAAYPLNSLEAQNRVDWNIDPDRAVLLVHDMQQYFLNFYAQDSELVKSLLSNIQEVKRACKAANIPVVYTAQPGGQSAKDRALLTDFWGPGLIDDESITKIHPSLTPEDEDIVYTKWRYSAFQRTPLENMMKESGRDQLIIVGIYAHIGCLQTTCEAFMMDIQAFMISDATADFSQTDHQMALDYVAGRCGYVLDKEQLIAQLPNQNSNEKGSEYPSAPSVYSIPKSEADLKAQIANLLSISVDELTMDDSLLDFGLDSIRMMSLVSSWQQSGLSVTFMDLATSPKVNEWWELIQHKTE

SEQ ID NO: 93010 - protein, 179 aa, Vibrio variabilis
  REGION 1..179: note = tr|A0A090SJ80|A0A090SJ80_9VIBR Isochorismatase; OS = Vibrio variabilis OX=990271 GN=JCM19239_5404 PE=4 SV=1
MLEQNNTQLMIIDVQGKLAQLMHDKEILFRNLNTLTKAASLMELPIIWVEQIPDKLGPTIEEISQELSHQTPIAKDVFSAWGEANVREATNASDRKQVLLVGIEAHICVHQTACDLLQAGYEVHLVTDAVSSRTQANKDLALKRLTQEGAVLTSTEMALFELQKVARGEQFKSLLKLIK

SEQ ID NO: 93011 - protein, 295 aa, Vibrio vulnificus
  REGION 1..295: note = sp|P74965|VENB_VIBVU Probable isochorismatase; OS = Vibrio vulnificus (strain CMCP6) OX=216895 GN=venB PE=3; SV = 2
MGIPKIAGYPLPTPAEFPDNRTGWTIDPDQAVLLIHDMQEYFVNYYQPDSSPVVDIIQHIQRLKAAAKKAGIPVIYTAQPANQHPTDRALLTDFWGPGLNGDHVPIVEALSPEEGDIEYVKWRYSAFKKTPLLEFMRAQGKSQLIISGIYGHIGILSTTLDAFMLDIQPFVIGDAIADFTREDHLRTLEYVASRSGSVKRLDEALDEIRSQKPLTLEQIQQDVATSLGIQPDEVDLDEDLMFVGLDSMRAMVLVEKWHQQGENISFGQLMEAASLREWWLVIEQARNEEQTMAVA

SEQ ID NO: 93012 - protein, 177 aa, Virgibacillus dokdonensis
  REGION 1..177: note = tr|A0A2K9IXL0|A0A2K9IXL0_9BACI Isochorismatase; OS = Virgibacillus dokdonensis OX=302167 GN=entB PE=4 SV=1
MLKSLEKTAVLFVDIINDFHFDGGKALASNTKEILPHLMSLRKFAKTNKLPIIYVNDHYGLWQADFRKIIDHCYNDASKDIIEALKPDDQDYFLIKPQHSAFFQTPLQSLLSELDKDSLILAGIAGDICILFTAKDAYMYGYKMHIPENCMASEGKDNNAYALYLLHAVMKADTTAI

SEQ ID NO: 93013 - protein, 189 aa, Weissella confusa
  REGION 1..189: note = tr|A0A5E8F2M9|A0A5E8F2M9_WEICO Isochorismatase; OS = Weissella confusa LBAE C39-2 OX=1127131 GN=entB PE=4; SV = 1
MKALLIIDYTNDFVAPEGPLTAGESAQALAPRLVELADEFLANGDAVILPTDLHVPNDPYHPETKLYPAHNVADTPGRDYYGALADWVAEHKDDEHVWIYPKNRYSSFANTDLDNYLRSRDIKDIHLTGVDTDICILHTAVDAYNLNYNITVHADGVASFTPTGHRWALWHFKNVLGATVTPDIDYNLD

SEQ ID NO: 93014 - protein, 183 aa, Xanthomonas campestris
  REGION 1..183: note = tr|B0RWJ4|B0RWJ4_XANCB Putative isochorismatase; OS = Xanthomonas campestris pv. campestris (strain B100); OX = 509169 GN=XCCB100_3866 PE=4 SV=1
MSTQRSALLIVDMFNRFDFDGGEQLAHRAQGAARSIDALAQRYRQAQRPVLYANDNFADWHADLPALIALASQADARGCEIARLLTPYPQDYHLLKPKHSAFLNTPLAPLLKDLRVEHLVITGVALDVCVLATAIDATAHGFAVSVPRDCATAETDVRETCARTILQDGFHAALARSASIEPA

SEQ ID NO: 93015 - protein, 179 aa, Xenorhabdus bovienii
  REGION 1..179: note = tr|D3V528|D3V528_XENBS Putative Isochorismatase; OS = Xenorhabdus bovienii (strain SS-2004) OX=406818; GN = XBJ1_3639 PE=4 SV=1
MKALIVIDMLNDFVTGVLANEEDAMKMIPSIQRMIKHARNNPDWLVVYANDAHRADDREMEIWGKHAMAGTWGADVIDELAPIGMEREIVSPKRFYNAFDGTGLEDVLAQYGVTEVVLTGQHIHCCVHHTAYGAFIRGYGITVLSDAVCAFPGIDQQAALDYLKTIYGAEITTSKAFGV

SEQ ID NO: 93016 - protein, 206 aa, Xenorhabdus cabanillasii
  REGION 1..206: note = tr|W1IKS5|W1IKS5_9GAMM Putative isochorismatase; OS = Xenorhabdus cabanillasii JM26 OX=1427517 GN=phzD PE=4; SV = 1
MNIPKIESYSLKFPEFNIISRVKWKHDNNRSILLVHDMQTYFLNFFHSDLRQELIRNCQKLIAYSRKNNIPIVYTAQRGDMTKKERGLLYDIWGKGMSRKDEHTAIVKELAPQPEDSILAKWRYSAFHATSLGDIFLKEKRDQIILCGVFAHIGIQTSSVDAYSRDIEVFLIQDAIADFSKQIHLQALIYADKCCAKVLPTQEICK

SEQ ID NO: 93017 - protein, 182 aa, Xenorhabdus doucetiae
  REGION 1..182: note = tr|A0A068QVI8|A0A068QVI8_9GAMM Putative Isochorismatase OS=Xenorhabdus doucetiae OX=351671; GN = XDD1_3070 PE=4 SV=1
MKALIVIDMLNDFVTGVLANEKQATEIIPVIQRVINYARNQPDWLVVYANDAHYADDREMGIWGKHAMAGTWGAEVVDALAPIGSEREIVSPKHFYSAFDGTDLDEVFGQYGVTEVVLTGQHTNCCVRHTAYSAFTRGYGITVLSDAVCVLPEVDHSEALDYLKTVYGVEITTSTELGVPSK

SEQ ID NO: 93018 - protein, 65 aa, Xenorhabdus ehlersii
  REGION 1..65: note = tr|A0A2D0IKM9|A0A2D0IKM9_9GAMM Isochorismatase; OS = Xenorhabdus ehlersii OX=290111 GN=Xehl_03776 PE=4 SV=1
MCVTATAIKALELGYENFVCADACASRDLKYIDGSLVDADSVHKAAMAALNDRYATLVNCSDVIN

SEQ ID NO: 93019 - protein, 210 aa, Xenorhabdus nematophila
  REGION 1..210: note = tr|N1NLL8|N1NLL8_XENNE Isochorismatase; OS = Xenorhabdus nematophila F1 OX=1306162 GN=XNC3_2330017; PE = 4 SV=1
MKKILSYPLPIYADLPQSTANWLADRHRAALLIHDMQKYFVDFFKTETNPIIGVISNIYMLLSIARNFNIPVFYTAQPGSMTPEQRGLLKDIWGEGMKSIDEHREIIPLLTPIKDEIVLTKWRYSAFFKSNLLNHLRDLNRSQLIICGVYAHIGCLSTAIDAYSHDIETFFVSDAVADFSEEKHHMALKMAAEICAVVASTEQIIVNLRK

SEQ ID NO: 93020 - protein, 294 aa, Xenorhabdus poinarii
  REGION 1..294: note = tr|A0A068R3S8|A0A068R3S8_9GAMM Isochorismatase; OS = Xenorhabdus poinarii G6 OX=1354304 GN=entB PE=4 SV=1
MSIPKLQDYTLPDEATLPANKVEWKLEPQRAALLIHDMQEYFLNFWGKESKMVQQIIDNIVILRARCHELGIPVFYTAQPDQQSDVERALLNDMWGPGLNRYPEQQKIVAALSPEQQDTVLVKWRYSAFQRSDLETQLKERKRDQLMICGVYAHIGCLTTATDAFMRDIQAFMISDALADFSREEHMMALRYTAGCSGQVLSSGMVLSALDSSAAESQWDRERLLTLLQSTLDEDVHDIDDDENLLDYGLDSLRMMSFVSKRRQEGYDLDFTSLMKQPTLRNWLTLLNGNLEAK

SEQ ID NO: 93021 - protein, 209 aa, Xenorhabdus szentirmaii
  REGION 1..209: note = tr|W1IUS4|W1IUS4_9GAMM Putative isochorismatase; OS = Xenorhabdus szentirmaii DSM 16338 OX=1427518 GN=phzD; PE = 4 SV=1
MSRTLKSESYGLGNIRIPSHQPLTWKIKTESCALLIHDMQRYFVHALPDNPAVNLINSTVKILRWAREKNIPVFYSAQPGRMTMEQRGLLVDLWGPGMRTTEEDRQIIDALFPYPEDTVLTKWRYSAFHQSDLADKLCEHQCDSLIITGIYASVGIQATGIDAFSHNIHPFVVADAIADFTQAGHQNAVDYMADNCARVLTSADVVNYE

SEQ ID NO: 93022 - protein, 212 aa, unidentified
  source 1..212: note = Xinfangfangia sp.
  REGION 1..212: note = tr|A0A3P5XFA6|A0A3P5XFA6_9RHOB Isochorismatase; OS = Xinfangfangia sp. CIP 111625 OX=2483812 GN=dhbB_2 PE=4; SV = 1
MAGLPQIAPYPLPQGDEIPAARGPWRVQTARAALLIHDMQLYFLRPFARQESPIAPAIANIARLAAHARARGIPVFYTAQEGDQPRCDRGLQADLWGPGMRADPEHQAITPELAPEPGDFVLVKHRYSAFQRSNLESLMRARGRDQLIVCGVYAHIGCLMTAAEAFQRDIEPFLAADALADFSRADHDLALKWAAGRCGVAMASDALIAALD

SEQ ID NO: 93023 - protein, 175 aa, Yersinia enterocolitica
  REGION 1..175: note = tr|A0A0H3NN53|A0A0H3NN53_YERE1 Isochorismatase; OS = Yersinia enterocolitica subsp. palearctica serotype O:3 (strain DSM 13030 / CIP 106945 / Y11) OX=930944; GN = Y11_2384 1 PE=4 SV=1
MTKEKVVIVIDMQNGVLANPRFDSAGRVARINQLIDHADQVIFIQHIEDDMTEGSELWQLLPELHHPESAISVNKTACDSFYRTSLDNIIAKFGATHLTICGCATDYCVDTTVKIAASKGYALTIASDAHTTADRQHVTAQQLIAQHNEVWSELAIPGNRITVKTTQQILTDWAG

SEQ ID NO: 93024 - protein, 302 aa, Yersinia frederiksenii
  REGION 1..302: note = tr|A0A380PU51|A0A380PU51_YERFR Nicotinamidase/isochorismatase family protein OS=Yersinia frederiksenii OX=29484 GN=entB PE=4 SV=1
MAIPVLPAYDLPKAGQFPANKVNWQFNPARAVLLIHDMQDYFVSFYGENNPLIQQVIANIAALRDYCKQQGVPVIYTAQPNHQSAEDRALLNDMWGAGLNHHPAKQRVVPELAPDEDDEVLVKWRYSAFYRSPLRQIMTDKGRDQLVICGIYGHIGCLTTATDAFMQDIQPFMVADAIADFSLDEHLMALKYVATRSGRVIFADEIVAHGNNSVANFSKNELKQQLLALIDESAEEFDEDENLIDYGLNSVHIMALATQWRQQGIELSFVDLAKSPSLNGWWKLLEKQLAAQTDNLTIAGVE

SEQ ID NO: 93025 - protein, 300 aa, Yersinia intermedia
  REGION 1..300: note = tr|A0A0H5LQ22|A0A0H5LQ22_YERIN Isochorismatase; OS = Yersinia intermedia OX=631 GN=entB PE=4 SV=1
MAIPVLSAYDLPKLGQFPANKVNWQFNPARAVLLIHDMQDYFVSFYGEDNPLIQQVIANIAALRQYCKQQGVPVIYTAQPNHQSAEDRALLNDMWGAGLNNHPAKQRVVSELTPDVEDEVLVKWRYSAFYRSPLRQIMTDKGRDQLVICGIYGHIGCLTTATDAFMQDIQPFMVADAIADFSLDEHLMALKYVATRSGRVIFTEEIVTNGNTANFSKDELKQQLLALVDESAEDFDENENLINYGLSSVHIMALATQWRQQGIELNFVDLAKSPSLNNWWILLEQQLANQTDRPALAGAE

SEQ ID NO: 93026 - protein, 302 aa, Yersinia kristensenii
  REGION 1..302: note = tr|A0A0T9L4P1|A0A0T9L4P1_YERKR Isochorismatase; OS = Yersinia kristensenii OX=28152 GN=entB PE=4 SV=1
MAIPVLSAYDLPTVGQFPANKVNWQFNPARAVLLIHDMQDYFVSFYGENNHLIQQVIANIAALRNYCKQQRIPVIYTAQPNHQSAEDRGLLNDMWGAGLNNHPAKQRVVSELTPDTDDEVLVKWRYSAFYRSPLRQIMADKGRDQLVICGIYGHIGCLTTATDAFMQDIQPFMVADAIADFSLEEHLMALKYVATRSGRVIFTDEIVANVNENTLIFSKEKLKQQLLALIDENADDFDENENLIDYGLSSVHIMALATQWRQQGIELSFVALAKNPSLNGWWKLLEPQLIDLDKNVSLVGAE

SEQ ID NO: 93027 - protein, 300 aa, Yersinia massiliensis
  REGION 1..300: note = tr|A0A0T9PXG8|A0A0T9PXG8_9GAMM Isochorismatase; OS = Yersinia massiliensis OX=419257 GN=entB PE=4 SV=1
MAIPVLSAYDLPKLGQFPANKVNWQFNPARAVLLIHDMQDYFVSFYGEDNPLIQQVIANIAALRQYCKQQGVPVIYTAQPNHQSAEDRALLNDMWGAGLNNHPAKQRVVSELTPDAEDEVLVKWRYSAFYRSPLRQIMTDKGRDQLVICGIYGHIGCLTTATDAFMQDIQPFMVADAIADFSLDEHLMALKYVATRSGRVIFTEEIVTNGNTANFSKDELKQQLLALVDESAEDFDENENLINYGLSSVHIMALATQWRQQGIELNFVDLAKSPSLNNWWILLEQQLANQTDRSALAGAE

SEQ ID NO: 93028 - protein, 294 aa, Yersinia nurmii
  REGION 1..294: note = tr|A0A0T9L0D2|A0A0T9L0D2_9GAMM Isochorismatase; OS = Yersinia nurmii OX=685706 GN=entB PE=4 SV=1
MAIPTLSAYQLPQAEHVPANKVGWQFDPTKAVLLIHDMQDYFVSFYGDNNPMINRVIDNIADIRRYCKRQGVPVIYTAQPNNQSPEDRALLNDMWGAGLNDHPAKQRVVSALTPDEDDEILVKWRYSAFHRSPLEQMMKEMGRDQLVICGIYGHIGCMITATDAFMKDIKPFMVADAVADFSLEEHLMALKYVATRSGRVIFTEELLGEANQSDNRFSKESLKAQLLALIDENAEDFDEDENLIDYGLNSVHIMALVTEWRQQGIELSFVDLAKSPSLNGWWALFEKHRAAGAK

SEQ ID NO: 93029 - protein, 294 aa, Yersinia ruckeri
  REGION 1..294: note = tr|A0A085U3B8|A0A085U3B8_YERRU Isochorismatase; OS = Yersinia ruckeri OX=29486 GN=entB PE=4 SV=1
MAIPTLSAYPLPQAKQIPVNKVDWQFDPAKAVLLIHDMQEYFVSFYGDNNPLIQQVIEHIVVLRRFCKSNGIPVIYTAQPNNQSSEDRALLNDMWGAGLNDHPAKQRVVHALTPDKDDKILVKWRYSAFHRSPLESMMKEMGRDQLVICGIYGHIGCMITATDAFMKDIKPFMVADAVADFTLEEHLMALKYVATRSGCVLFTEDLLGKSTAAAEKFSKEALKTQILALIDESAEDFDEDENLIDYGLNSVHIMALVTEWRQQGITLSFVDLARAPSLNGWWAVFEKQCLMGAK

SEQ ID NO: 93030 - protein, 283 aa, Yokenella regensburgei
  REGION 1..283: note = tr|A0A2X2S9M6|A0A2X2S9M6_9ENTR Isochorismatase; OS = Yokenella regensburgei OX=158877 GN=entB PE=4 SV=1
MAIPKLQAYALPGADDIPANKVDWAFEPERAALLIHDMQEYFLNFWGENSPMMETVVANIAALRQYCKQHHIPVYYTAQPKTQSDEDRALLNDMWGPGLTRSPEQQQVIAALAPDEADTVLVKWRYSAFHRSPLEEMLKQTGRNQLIITGVYAHIGCMTTATDAFMRDIKPFFVADALADFSREEHLMSLNYVAGRSGRVVMTENLLPVPLSKAALRTTILPLLDESDVPLDDENLIDYGLDSVRMMSLAARWRKVHGDIDFVMLAKNPTIDAWWTLLSREVK

SEQ ID NO: 93031 - protein, 289 aa, Acinetobacter baumannii
  REGION 1..289: note = tr|A0A385EYU0|A0A385EYU0_ACIBA Enterobactin synthase component B OS=Acinetobacter baumannii WM99c OX=945555; GN = entB PE=4 SV=1
MAISKISTYLMPERESYPNNKTDWQLDPSRAVLLIHDMQRYFLNFYDAESELIKTVVNHLVQLRTWAHQNNVPVVYTAQPYEQPAADRALLNAMWGPGLPASTIDQQKIIDQLSPAEHDIVLTKWRYSAFKRSDLLERMQNWNRDQLIIGGVYAHIGCMVTAIEAFMSDIQPFLVGDAVADFSEEEHRLALKYVSSRCGQVVDTESVVGQVATGITRPWLEQKVQQLIEEDELDPEENLILYGLDSLRIMQFSSELKAQGINISFEELGRTPTLSNWWSLVDARQRIAG

SEQ ID NO: 93032 - protein, 556 aa, Aeromonas salmonicida
  REGION 1..556: note = tr|T0QTH2|T0QTH2_AERSA Enterobactin synthase component EntE OS=Aeromonas salmonicida subsp. pectinolytica 34mel OX=1324960 GN=entE PE=4 SV=1
MTQANRFLPYTRWPAELAEQYRAKGYWRGEPLTTMLDRQCEVAPDATAILCGERSFSYHELDAASSRLAGRLARHGLGVGDTALVQLPNVAEFYLVFFALLKAGIAPVNALFSHNRLELASYAEQIRPRLFIGSLAHPLFASGERHSDLLRGIGAELVLLDGESGELGLTHWLSDLAKREGLAVPAYGPSPADEVAFFQLSGGSTGTPKLIPRTHDDYYYSVRRSNEICGLGPHTRYLCALPAPHNFPLSSPGALGVFEAGGAVVLAPDPGPMSCFPLVARHQVNLTSLVPPAVSLWLQAAESDPSVRSQLPSLDLLQVGGAKLAEAVARKITPLLGCRLQQVFGMAEGLVNYTRLSDLDEKIIHTQGRPMSPDDEVRILDEAGNPVTPGQPGALHTRGPYTFRGYYQSQAHNARVFDADGFYCSGDLVVQDADGYLTVVGRQKDQINRGGEKIAAEEVENQLLHHPAITQAALVSMPDSAMGEKSCAFIVSTDPGLKPLALRKFLRERGVADFKLPDRFETLDALPMTAVGKIDKQGLRAQIAEVIAAGQPLTTA

SEQ ID NO: 93033 - protein, 491 aa, unidentified
  source 1..491: note = Aliiroseovarius pelagivivens
  REGION 1..491: note = tr|A0A2R8AMB7|A0A2R8AMB7_9RHOB Enterobactin synthase component E OS=Aliiroseovarius pelagivivens OX=1639690; GN = entE PE=4 SV=1
MTVIQSNSDSMKQAGSIGTVFMAHVLADPDAPFFIQGDTQISRGDFLRQVVGVRAFFSAQGIAAGAVVGLANTDQIRSFAAMFALWSLGAAPLVLDYRISQAERQHVAQAAGVSAIFSDFKGLSAQSGCHSLPRDLPLSDDIMALTFPSDPDAIVDFRQSSGTTALPKLQPISAQTLFDMTEKRCDPPSHVTQGNIVSCLNLAFAGTRYLWFRNAYLGRAIISVPLFFTPAQLDTAMRHPLAEEATLPPVIMKRLVEYVDALDGQPAHPRYPNLSKLQSIGGPLTGQMLLDVQRLLSDRISTTYSFSEAGVVSRLYGDDIARNPTAAGRVLSGVTVATEDQDGEPLPAHMPGSLVVTKDGETFRPGDHGYLSDEGLLYITGRSAERFCRNSVTFTASDVAERIRSLDTVTDCCVFAAPGQLDGEDIVVAAIESDPANQVDIASTLRSLMLAEIRPDHIRCYPALPRGSAMKVSIQDLKQHHLQEPEKYHDL

SEQ ID NO: 93034 - protein, 184 aa, Bacillus pumilus
  REGION 1..184: note = tr|A0A498U5V6|A0A498U5V6_BACPU Enterobactin synthase component B OS=Bacillus pumilus OX=1408 GN=entB PE=4 SV=1
MSKQKKALLIIDMINDFDFEMGHVLAEKTEQMTNKILALKQHAFKENWPIIYINDHYGLWKADIQAVMETCKNERSAPILEKMTPSKDNYFLIKPKHSAFYGTALETLLNELGVEDIILTGIAGNICVLFTANDAYMREYNLIVPKDCIASNDDRDNDYALTMMENVLLAKITTAKEITNENQT

SEQ ID NO: 93035 - protein, 184 aa, Bacillus safensis; identical to SEQ ID NO: 93034
  REGION 1..184: note = tr|A0A5C0WGC9|A0A5C0WGC9_9BACI Enterobactin synthase component B OS=Bacillus safensis OX=561879 GN=entB PE=4; SV = 1

SEQ ID NO: 93036 - protein, 86 aa, Bacillus sp.
  REGION 1..86: note = tr|A0A553ZSE2|A0A553ZSE2_9BACI Enterobactin synthase subunit EntD (Fragment) OS=Bacillus sp. P16(2019); OX = 2597270 GN=entD PE=4 SV=1
ALREYGYKCVPAIGELRQPVWPAEVYGSISHCGTTALAVVSRQPIGIDIEEIFSVQTARELTDNIITPAEHERLADCGLAFSLALT

SEQ ID NO: 93037 - protein, 311 aa, unidentified
  source 1..311: note = Bacillus velezensis
  REGION 1..311: note = tr|A0A410L6C3|A0A410L6C3_9BACI Isochorismatase; OS = Bacillus velezensis OX=492670 GN=dhbB PE=4 SV=1
MFTLAIPSIPAYALPTASDMPENKVSWTLNPKRAVLLIHDMQNYFVDAFAKGEAPITEAAQNIKKIKEQCKALGIPVVYTAQPGSQDPADRALLTDFWGPGLKSGPYEEKVIPELAPDDQDIVLTKWRYSAFKRTNLLDIMRESGRDQLMITGIYAHIGCLVTACEAFMDDIQSFFIGDAVADFSSEKHKMAIEYASQRCAYTALTNEVLELLGGAPVSEGEEKASAVLTKDRVREQIAAILQESPSDIPDHEDLLDRGLDSVRIMSLVEQWRRDGAEVTFVELAENPTLEEWWRLLSSRSQKVLPNADYL

SEQ ID NO: 93038 - protein, 224 aa, Buttiauxella sp.
  REGION 1..224: note = tr|A0A5C5DAQ5|A0A5C5DAQ5_9ENTR Enterobactin synthase subunit EntD OS=Buttiauxella sp. B2 OX=2587812 GN=entD; PE = 3 SV=1
MEHQLSQFDISPDIHVYRVDFDAATFKPEDLLWIPHHNRLSNAVNKRKAEHLAGRIAANQALRFHGIKDYIPGIGLHREPCWPPGFTGSITHSGNVALATVITDNPLQRMGIGIDYEEIIAPQVAEEIYGGIIDCAEKELISASPFSFNYALTLVFSAKESLFKALFRHVGRYFDFSAASLNEIDYQHLSLTLNHSLGPYQKGDTFIATWKGDAAQLITLIRLG

SEQ ID NO: 93039 - protein, 207 aa, Citrobacter amalonaticus
  REGION 1..207: note = tr|A0A515AEH2|A0A515AEH2_CITAM Enterobactin synthase subunit EntD OS=Citrobacter amalonaticus OX=35703 GN=entD; PE = 3 SV=1
MQTTHSSLILAHHTLHGVAFEPDTFHEHDLLWLPHHAQLARAGRKRKAEHLAGRIAAVQALREWGHKNVPGMGEQRQPLWPEGLSGSISHCATTALAVVSYQPVGVDIEAIFTAQTAAELAGSIVTEAEKVRLAGSGLPFEQALTLAFSAKESAFKATPKRSQAGCGFMHYHILDVQHDQMRLQAIDQIWHVQWLVKNSHVITVATG

SEQ ID NO: 93040 - protein, 1296 aa, Citrobacter braakii
  REGION 1..1296: note = tr|A0A4R0MCX3|A0A4R0MCX3_CITBR Enterobactin non-ribosomal peptide synthetase EntF OS=Citrobacter braakii OX=57706 GN=entF PE=3 SV=1
MTQRLPLVAAQPGIWMAEKLSTLPSAWSVAHYVELTGELDAPLLAKAVVAGLQQADTLRMRFSEDNGEVWQWVDSALAFAPPEIIDLREKSDPHATARALMQADLQQDIRADGTKPLVFHLLIQVGEKRWYWYQRYHHLLVDGFSFPAITRQIAAIYRVWLHGEPTPESPFTPFSEVVEEYQQYRQSDAWQRDGAFWTEQRKQLPPPASLSNKPLPGRSASADIIRLKLTAPEGEFRRLAARMPDVQRADLALALVALWLGRLCSRMEYAAGFIFMRRMGSAALTSTGPVLNVLPFGVQLNAAESLPALAQRLAAQLKKMRRHQRYDAEQIVRDSGRAAGAEPLFGPVLNVKIFDYQLNIPGVQAQTHTLATGPVNDLELALFPDENGGLSIEILANKQRYDAATLAQHASRLTALIAQFADNPSLCCGDAGMLLPTEHERLAKINDTTVAIPSTTLSALVAQQADKTPDAPALADARYQFSYREMRQQVVALARRLRERGVQPGDSVAVALPRSVFLTLALHGIVEAGAAWLPLDTGYPDDRLRMMLEDAKPKLLIATEEQLARFSDIPELESLCYNAPLPEEDAAPLALSQPNHTAYIIFTSGSTGRPKGVMVGQTAIVNRLLWMQNHYPLTADDVVAQKTPCSFDVSVWEFFWPFIAGAKLVMAEPEAHRDPLAMQQFFAQSGVTTTHFVPSMLAAFVASLTPETARESCASLKRVFCSGEALPADLCREWEQLTHAPLHNLYGPTEAAVDVSWYPAWGDDLAAVTGNSVPIGYPVWNTGLRILDAMMRPVPFGVAGDLYLTGIQLAQGYLGRADLTASRFIADPFNPGERMYRTGDVARWLENGAVEYLGRSDDQLKIRGQRIELGEIDRVMQQLPDVEHAVAHACVFNQAAATGGDARQLVGYLVSQSGLPLDTSALRETLREKLPAHMVPTVLLQLAELPLSANGKLDRKALPMPQLTSRTSGRAPRAGTETAIAQSFAALLDCEVNDVEADFFALGGHSLLAMKLAAQLSQIFERQVTPGQIMVASTVEQLSALLESNDDEQSQRLGFETLLPLRESHGPTLFCFHPASGFAWQFSVLSRYLSPQWSIIGIQSPRPDGPMQTAENLDAVCEHHLATLLSQQPHGPYYLLGYSLGGTLAQGIAARLHARGETVAFLGLLDTWPPETQNWQEKEANGLDPAVLAEIEREREAFLAAQQGNASEALFNAIEGNYADAVRLLTTAHSVPFAGHATLFVAERTLVPGVSPERSWSPWISSLDVYRQDCAHVDIISPSSFEAIGPIINTLINKSV

SEQ ID NO: 93041 - protein, 1296 aa, Citrobacter freundii
  REGION 1..1296: note = tr|A0A241QE65|A0A241QE65_CITFR Enterobactin non-ribosomal peptide synthetase EntF OS=Citrobacter freundii OX=546 GN=entF PE=3 SV=1
MTQRLPLVAAQPGIWMAEKLSTLPSAWSVAHYVELTGELDALLLAKAVVAGLEQADTLRMQFSEDNGEVWQWVDPALTFAQPEIIDLREKSNPHEAARALMQADLQQDIRADGNKPLVFHQLLQVGDKRWYWYQRYHHLLVDGFSFPAITRQIAAIYRAWLDGESTPDSPFTPFAEVVEEYQQYRQSDAWQRDGAFWREQRKQLPPPASLSNNPLPGRSASADIIRMKLTAPEGAFRRLAARMPDVQRADLALALVALWLGRLCSRMDYAAGFIFMRRMGSAALTSTGPVLNVLPFGVRLDAAESLPALAQRLAGQLKKMRRHQRYDAEQIVRDSGRAAGAEPLFGPVLNVKIFDYHLNIPGVQAQTHTLATGPVNDLELALFPDENGGLSIEILANKQRYDAETLAQHASRLIGLIEQFADNPSLCCGDAGMLLPTEHERLAKINATTVEIPFTTLSALVTQQADKTPDAPALADARYQFSYREMRQQVVALASLLRERGVRPGDSVAVALPRSVFLTLALHGIVEAGAAWLPLDTGYPDDRLRMMLEDAKPKLLIATEEQLARFSDIPGLESLCYDSPLPAEDAAPLALSQPNHTAYIIFTSGSTGRPKGVMVGQTAIVNRLLWMQNHYPLTADDVVAQKTPCSFDVSVWEFFWPFIAGAKLVMAEPEAHRDPLVMQQFFARYGVTTTHFVPSMLAAFVASLTPETARESCASLKRVFCSGEALPADLCREWEQLTHAPLHNLYGPTEAAVDVSWYPAWGEDLAAVTGNSVPIGYPVWNTGLRILDAMMRPVPFGVAGDLYLTGIQLAQGYLGRPDLTASRFIADPFSVGERMYRTGDVARWLENGAVEYLGRSDDQLKIRGQRIELGEIDRVMQQLPDVEHAVAHACVFNQAAATGGDARQLVGYLVSQSGLPLDTTVLRERLREKLPAHMVPTVLLQLAELPLSANGKLDRKALPMPQLTSRVSGRAPRTGTETTIAQSFAALLDCEVNDVEADFFALGGHSLLAMKLAAQLSRIFERQVTPGQIMVASTVEQLSALLESNDDEQSQRLGFETLLPLRESHGPTLFCFHPASGFAWQFSVLSRYLSPQWSIMGIQSPRPDGPMQTAENLDSVCEHHLATLLSQQPHGPYYLLGYSLGGTLAQGIAARLHARGETVAFLGLLDTWPPETQNWQEKEANGLDPAVLAEIEREREAFLAAQQGNASEALFNAIEGNYADAVRLLTTAHSVPFAGHATLFVAERTLVPGVSPERSWSSWISSLDVYRYDCAHVDIISPTAFEAIGPVINTLINKSV

SEQ ID NO: 93042 - protein, 217 aa, Citrobacter koseri
  REGION 1..217: note = tr|A0A3R9C0L2|A0A3R9C0L2_CITKO Enterobactin synthase subunit EntD OS=Citrobacter koseri OX=545 GN=entD PE=3 SV=1
MQTTYTALSFSRHKLHLIGFDIDSFHEHDLLWLPHHAQLLPAGRKRQAEHLAGRLAAFHALTEYGHKTVPAIGDKRQPLWPEGLFGSISHSAATALAVVSLTPVGVDIEAIFTPQTAAELTNSIVDNDEQRVLQHSSLPFPLALTLAFSAKESVYKAFSDRAATLPGFASARIVSVTKTHLTMQMTSAFSPQLADCTVDISWREYDGQVITLCASAL

SEQ ID NO: 93043 - protein, 1296 aa, unidentified
  source 1..1296: note = Citrobacter portucalensis
  REGION 1..1296: note = tr|A0A4P7UP48|A0A4P7UP48_9ENTR Enterobactin non-ribosomal peptide synthetase EntF OS=Citrobacter portucalensis OX=1639133 GN=entF PE=3 SV=1
MTQRLPLVAAQPGIWMAEKLSTLPSAWSVAHYVELTGELDASLLAKAVVAGLEQADTLRMRFSEDNGEIWQWVDSALAFAQPEIIDLREKSNPHEAARALMQADLQQDIRADGNKPLVFHLLIQVGEKRWYWYQRYHHLLVDGFSFPAITRQIAAIYRAWLHGEPTPDSPFTPFAEVVEEYQQYRQSDAWQRDGAFWSEQRKQLPPPASLSNNPLPGRSASADIIRMKLTAPEGAFRRLAARMPDVQRADLALALVALWLGRLCSRMDYAAGFIFMRRMGSAALTSTGPVLNVLPFGVRLDAAESLPVLAQRLAGQLKKMRRHQRYDAEQIVRDSGRAAGAEPLFGPVLNVKIFDYQLNIPGVQAQTHTLATGPVNDLELALFPDENGGLSIEILANKQRYDAVTLAQHASRLIGLIEQFADNPALCCGDAGMLLPTEHERLAKINDTTVEIPSTTLSGLVAQQADKTPDAPALADARYQFSYREMHQQVVALASLLRARGVKPGDSVAVALPRSVFLTLALHGIVEAGAAWLPLDTGYPDDRLRMMLEDAKPKLLIATNEQLARFSDIPGLESLCYDSPLPAEDAAPLALSQPNHTAYIIFTSGSTGRPKGVMVGQTAIVNRLLWMQNHYPLTADDVVAQKTPCSFDVSVWEFFWPFIAGAKLVMAEPEAHRDPLAMQQFFAQYGVTTTHFVPSMLAAFVASLTPETARESCASLKRVFCSGEALPADLCREWEQLTHAPLHNLYGPTEAAVDVSWYPAWGEDLAAVTGNSVPIGYPVWNTGLRILDAMMRPVPFGVAGDLYLTGIQLAQGYLGRPDLTASRFIADPFNVGERMYRTGDVARWLENGAVEYLGRSDDQLKIRGQRIELGEIDRVMQQLPDVEHAVAHACVFNQAAATGGDARQLVGYLVSQSGLPLDTSALREKLREKLPAHMVPTVLLQLAELPLSANGKLDRKALPMPQLTSRTSGRAPRAGTETTIAQSFAALLGCEVNDVAADFFALGGHSLLAMKLAAQLSRVFERQVTPGQIMVASTVEQLSALLESTDDEQSQRLGFEALLPLRESHGPTLFCFHPASGFAWQFSVLSRYLSPQWSIIGIQSPRPDGPMQTAENLDAVCEHHLTTLLSQQPHGPYYLLGYSLGGTLAQGIAARLHARGETVAFLGLLDTWPPETQNWQEKEANGLDPAVLAEIEREREAFLAAQQGNASEALFNAIEGNYADAVRLLTTAHSVPFAGHATLFVAERTLVPGVSPERSWSPWISSLDVYRQDCAHVDIISPASFEAIGPVINALINKSV

SEQ ID NO: 93044 - protein, 1295 aa, Citrobacter rodentium
  REGION 1..1295: note = tr|A0A482PUP4|A0A482PUP4_CITRO Enterobactin non-ribosomal peptide synthetase EntF OS=Citrobacter rodentium OX=67825 GN=entF PE=4 SV=1
MSRRLPLVAAQPGIWMAEKLSTLPSAWSVAHYVALNGELDAPLLARAIVTGMQQADTLRMRFSEDNGDVWQWVDESLTFAEPPITDLRHAADPHQAALAVMQADLQQNLRADSGKPLAFQQLIQVADDRWYWYQRYHHLLVDGFSFPAITRQIAMIYRAWQRGDATPASPFTPFADVVDEYQQYRQSDAWQRDGAFWAQQRSELPPPASLSSAPLPGRAATADILRLKLNAPEGAFRRLSAHFPDAQRADLALALVTLWLGRVCNRMEYAAGFIFMRRMGSAALTASGPVLNVLPLAVRIDAAESLAELAQRLSAQLKKMRRHQRYDAEQIVRDGGRAAGEEPLFGPVLNVKVFDYQLDLPGIRAQTHTLATGPVNDLELALFPDEEGGLSIELLANRQRYDEATLTKHAARLTAMIEQFAENPALRCGDAEMLLTSEYQQFAWINATAVEIPATTLSALVAQQASRTPDAPALADSLYQFSYREMREQVVALATLLRQRGVKPGDSVAVALPRSVFLTLALHGIVEAGAAWLPLDTGYPDDRLRMMLEDAGPKLLITTEEQLPRFSDIPGLESLCYAEPLAGGDTAPLGLSQPQHTAYIIFTSGSTGRPKGVMVGQTAIVNRLLWMQNHYRLTADDVVAQKTPCSFDVSVWEFFWPFIAGAKLVMAAPEAHRDPFAMQHFFSRYGVTTTHFVPSMLAAFVAALTPESARQSCATLKHVFCSGEALPADLCREWEQLTHAPLHNLYGPTEAAVDVSWYPASGEALAAVNGSSVPIGFPVWNTGLRILDAMMHPVPVGVAGDLYLTGIQLAQGYLGRPDLTASRFIADPFAPGERMYRTGDVARWLDNGAVEYLGRSDDQLKIRGQRIELGEIDRVMQALPDVEQAVAHACVFNQAAATGGDARQLVGYLVSRSGLPLNIPALQAQLRDKLPPHMVPVVLLQLAQLPLSANGKLDRKALPMPELTRRVKGRAPRPGAESRVAQAFSALLGCEVDDVEADFFALGGHSLLAMKLAAQLSRDCARQVTPGQVMVASTVAQLAALLAADDDAQSRRLGFETLLPLRKSDGPTLFCFHPASGFAWQFSVLSRYLSPQWSITGIQSPRPHGPMQTAADLDAVCERHLTTLLAQQPHGPYYLLGYSLGGTLAQGIAARLRARGETVAFLGLLDTWPPETQNWSEKEANGLDPEVLAEIDRERQAFLAARQGNTSDELFGIIEGNYADAVRLLTTAHSVPFDGRATLFVAERTLPEGVSPEKSWAPWIAELEVYRQDCAHVDIISPAAFESIGPIVARKLNGG

SEQ ID NO: 93045 - protein, 1296 aa, Citrobacter sp.
  REGION 1..1296: note = tr|A0A4Y5ZDV8|A0A4Y5ZDV8_9ENTR Enterobactin non-ribosomal peptide synthetase EntF OS=Citrobacter sp. CF971 OX=2566012 GN=entF PE=3 SV=1
MTQRLPLVAAQPGIWMAEKLSTLPSAWSVAHYVELTGELDALLLAKAVVAGLEQADTLRMQFSEDNGEVWQWVDPALTFAQPEIIDLREKSNPHEAARALMQADLQQDIRADGNKPLVFHQLLQVGDKRWYWYQRYHHLLVDGFSFPAITRQIAAIYRAWLDGESTPDSPFTPFAEVVEEYQQYRQSDAWQRDGAFWREQRKQLPPPASLSNNPLPGRSASADIIRMKLTAPEGAFRRLAARMPDVQRADLALALVALWLGRLCSRMDYAAGFIFMRRMGSAALTSTGPVLNVLPFGVRLDAAESLPALAQRLAGQLKKMRRHQRYDAEQIVRDSGRAAGAEPLFGPVLNVKIFDYHLNIPGVQAQTHTLATGPVNDLELALFPDENGGLSIEILANKQRYDAETLAQHASRLIGLIEQFADNPSLCCGDAGMLLPTEHERLAKINDTTVEIPFTTLSALVTQQADKTPDAPALADARYQFSYREMRQQVVALASLLRERGVRPGDSVAVALPRSVFLTLALHGIVEAGAAWLPLDTGYPDDRLRMMLEDAKPKLLIATEGQLARFSDIPGLESLCYDSPLPAEDAAPLALSQPNHTAYIIFTSGSTGRPKGVMVGQTAIVNRLLWMQNHYPLTADDVVAQKTPCSFDVSVWEFFWPFIAGAKLVMAEPEAHRDPLAMQQFFARYGVTTTHFVPSMLAAFVASLTPETARESCASLKRVFCSGEALPADLCREWEQLTHAPLHNLYGPTEAAVDVSWYPAWGEDLAAVTGNSVPIGYPVWNTGLRILDAMMRPVPFGVAGDLYLTGIQLAQGYLGRPDLTASRFIADPFNVDERMYRTGDVARWLENGAVEYLGRSDDQLKIRGQRIELGEIDRVMQQLPDVEHAVAHACVFNQAAATGGDARQLVGYLVSQSGLPLDTTVLRERLREKLPAHMVPTVLLQLAELPLSANGKLDRKALPMPQLMSRVSGRAPRTGTETTIAQSFAALLDCEVNDVEADFFALGGHSLLAMKLAAQLSRIFERQVTPGQIMVASTVEQLSALLESNDDEQSQRLGFETLLPLRESYGPTLFCFHPASGFAWQFSVLSRYLSPQWSIMGIQSPRPDGPMQTAENLDSVCEHHLATLLSQQPHGPYYLLGYSLGGTLAQGIAARLHARGETVAFLGLLDTWPPETQNWQEKEANGLDPAVLAEIEREREAFLAAQQGNASEALFNAIEGNYADAVRLLTTAHSVPFAGHATLFVAERTLAPGVSPERSWSSWISSLDVYRYDCAHVDIISPTAFEAIGPVINTLINKSV

SEQ ID NO: 93046 - protein, 225 aa, Citrobacter sp.
  REGION 1..225: note = tr|A0A4P6WL28|A0A4P6WL28_9ENTR Enterobactin synthase subunit EntD OS=Citrobacter sp. LY-1 OX=2546350 GN=entD; PE = 3 SV=1
MYTTHTPLTFADHTLHIVEFDPDSFHEHDLLWLPHHTQLQPSGRKRKAEHLAGRIAAVHALREYGIKAVPGIGGQRQPLWPQTLFGSISHSASTALAVVSTHPVGLDIEAIFTPQTAVELTDGIIDNRERSILHHAGLPFPLALTLAFSAKESLYKTFSEHTTALPGFASAKVNALTPTQITLQIQPLFSQSLAGQEINVRWYQRDENVITFCMSSTPCPRSFSV

SEQ ID NO: 93047 - protein, 217 aa, Citrobacter sp.
  REGION 1..217: note = tr|A0A4V6BLT2|A0A4V6BLT2_9ENTR Enterobactin synthase subunit EntD OS=Citrobacter sp. wls830 OX=2576411 GN=entD; PE = 3 SV=1
MHTTHTPLTFADHTLHIVEFDPASFHEQELLWLPHHAQLLSNGRKRNAEHLAGRIAAVYALREFGLKTVPGIGAQRQPLWPRNLFGSISHSASTALAVVSTRPVGVDIETIFPPPTAVELAESIVDNHERQIMPHANLPFPLALTLAFSAKESLYKTFSEHTTALPGFASAKVTALTPTQITLRILPLFSQSLAGQEINVRWFQRDRQVITLCDVIF

SEQ ID NO: 93048 - protein, 220 aa, Citrobacter sp.
  REGION 1..220: note = tr|A0A4U6DBR4|A0A4U6DBR4_9ENTR Enterobactin synthase subunit EntD OS=Citrobacter sp. wls831 OX=2576410 GN=entD; PE = 3 SV=1
MHTTHIPLPFADHTLHIVEFDPDTFHEHDLLWLPHHTQLHSSGRKRKAEHLAGRIAAVHALREFGHKTVPGIGVQRQPLWPQDLFGSISHSATTALAVVSTHPIGLDIEAIFTPQTAVELADGIIDNHEHQILQHTCLPFPLALTLVFSAKESLYKAFSNQASGLPGFTSAKITALTTQQLTLQIMPSFSANLGNQEVNVHWFQRDKNIVTLFPFSPSGS

SEQ ID NO: 93049 - protein, 1296 aa, Citrobacter werkmanii
  REGION 1..1296: note = tr|A0A4Q4BJX5|A0A4Q4BJX5_9ENTR Enterobactin non-ribosomal peptide synthetase EntF OS=Citrobacter werkmanii OX=67827 GN=entF PE=4 SV=1
MTQRLPLVAAQPGIWMAEKLSTLPSAWSVAHYVELTGELNAPLLAKAIVAGLEQADTLRMRFSEDNGEVWQWVDPALTFAEPEIFDLREKSHPHEAARALMQADLQQDLRADGHKPLVFHQLIQVGDNRWYWYQRYHHLLVDGFSFPAITRQIAAIYCAWQSGEPTPDSPFTPFAEVVEEYQQYRQSDAWQRDATFWTEQRKQLPPPASLSNKPLPGRSASADIIRLKLTAPEGAFRQLAARMPDVQRADLALALVALWLGRLCSRMDYAAGFIFMRRMGSAALTSTGPVLNVLPFGVRLDAAESLPALAQRLAGQLKKMRRHQRYDAEQIVRDSGRAAGTEPLFGPVLNVKIFDYQLNIPGVQAQTHTLATGPVNDLELALFPDENGGLSIEILANKQRYDAATLAQHASRLTALIEQFADNPALCCGEAGMLLPAEYEQLAKINDTTVEIPATTLSALVAQQADKTPDAPALADARYQFSYREMRQQVVALAHLLRARGVQPGDSVAVALPRSVFLTLALHGIVEAGAAWLPLDTGYPDDRLRMMLEDAKPKLVIATDDQLARFGDIPGLESLCYNAPLSVGDTAPLALSQPHHTAYIIFTSGSTGRPKGVMVGQTAIVNRLLWMQNHYPLTAEDVVAQKTPCSFDVSVWEFFWPFIAGAKLVMAEPEAHRDPLAMQQFFAQYGVTTTHFVPSMLAAFIASLTPETAQKSCASLKQVFCSGEALPADLCREWEQLTHAPLHNLYGPTEAAVDVSWYPAWGEALAAVTGNSVPIGYPVWNTGLRILDAMMRPVPFGVAGDLYLTGIQLAQGYLGRADLTASRFIADPFNAGERMYRTGDVARWLENGAVEYLGRSDDQLKIRGQRIELGEIDRVMQQLPDVEHAVAHACVFNQAAATGGDARQLVGYLVSQSGLPLDTSALRESLREKLPAHMVPTVLLQLAALPLSANGKLDRKALPMPQLTSRTTGRAPRPGIETTIAHSFAALLDCEINDVEADFFALGGHSLLAMKLAAQLSRMFERLVTPGQIMVASTVKQLSALLESDDDEQSQHLGFETLLPLRESHGPTLFCFHPASGFAWQFSVLSRYLSPQWSITGIQSPRPDGPMRKAENLDAVCDHHLATLLNQQPHGPYYLLGYSLGGTLAQGIAARLHARGEDVAFLGLLDTWPPETQNWQEKEANGLDPAVLAEIEREREAFLAAQQGNASDALFNAIEGNYVDAVRLLTTAHSVPFAGHATLFVAERTLPQDVSPERSWSPWISSLDVYRQDCAHVDIISPTAFETIGPVINALINQSA

SEQ ID NO: 93050 - protein, 220 aa, Citrobacter youngae
  REGION 1..220: note = tr|A0A549UKS0|A0A549UKS0_9ENTR Enterobactin synthase subunit EntD OS=Citrobacter youngae OX=133448 GN=entD PE=3; SV = 1
MRTTHTSLPFADYSLQIIEFDPNSFHEHDLLWLPHHAQLTAGARKRKAEHLAGRIAAIHALREYGIKTVPGIGEQRQPLWPHGLFGSISHSATTALAVVSRHPVGLDIEAIFSPQVAAELADSIIDNTERKVLLHASLPFPLALTLAFSAKESLYKAFSTQASGLPGFASAKITALTTQHITLQIMPSFSANLGNQDVNVRWFQRGNNIITLCPASPSGS

SEQ ID NO: 93051 - protein, 234 aa, Cronobacter sakazakii
  REGION 1..234: note = tr|A0A5D1BG72|A0A5D1BG72_CROSK Enterobactin synthase subunit EntD OS=Cronobacter sakazakii OX=28141 GN=entD; PE = 3 SV=1
MTTAGSDARLFPMQTTLTSLTFAGQLLWRVDFSPDTFTPADLLWLPHHAMLANAVAQRQAEHLAGRIAAVAALKAAGAPFSPPGIGAHREPRWPAGFTGSITHTGHRAWAVVIATLGGIGIDVENLMNAQTARELAPGIIDTQERALLTRTPLPFASALTLAFSAKESLFKALFPQVGDWFGFECAKVVALDDHQLTLRLACPLGPFAQTQCFTLHWRQEAQQILTLVNAPGSG

SEQ ID NO: 93052 - protein, 291 aa, Dickeya dianthicola
  REGION 1..291: note = tr|A0A385XZS3|A0A385XZS3_9GAMM Enterobactin synthase component B OS=Dickeya dianthicola OX=204039 GN=entB PE=4; SV = 1
MAIPKLNAYPLPGVEHLPVNKVNWPVDAARAALLIHDMQNYFLNFWGEDSLLTEQLVANVARIRQACRQQGIPVFYTAQPNQQSDADRALLNDMWGPGLNRHPDQQQIAAALTPDANDTVLVKWRYSAFHRSDLEQRLNAAGRDQLIICGVYAHIGCLTTATDAFMRDIKPFMVADALADFSQEEHLMALRYTAGRCGRVLTSEQLLDALAPQTDDGLARLRAELLPLLDDDDDIGDDDNLLDYGLDSVRIMSLVTRWRQQGHDLDFVALVKNPTLRHWHQLLNRRQREEA

SEQ ID NO: 93053 - protein, 215 aa, Enterobacter asburiae
  REGION 1..215: note = tr|A0A5A9A1A3|A0A5A9A1A3_ENTAS Enterobactin synthase subunit EntD OS=Enterobacter asburiae OX=61645 GN=entD; PE = 3 SV=1
MHTTHRTFILAGHTVHHVTFDPTTFTDADLLWLPHHAELSKAGRKRKAEHLAGRIAAAHALPEHTVPGIGPSGEPLWPEGVSGSITHSGTQAIAVAVRYPDALVGIDCEAILPDREAREIQDGIINAQEAMCLTRSGYPFALALTLAFSAKESLFKAFFPQVKTFMGFEWARVTELTEKTITLALSHPAGDYPEGKRFTLIWQNNDTSVWTLLKA

SEQ ID NO: 93054 - protein, 218 aa, Enterobacter cloacae
  REGION 1..218: note = tr|A0A4V1AFC6|A0A4V1AFC6_9ENTR Enterobactin synthase subunit EntD OS=Enterobacter cloacae complex sp.; OX = 2027919 GN=entD PE=3 SV=1
MRTTHTTFILAGHTVHHVTFDPTTFTDADLLWLPHHAELSNAGRKRKAEHLAGRTAAAHALSAINERVIPGIGPSGEPLWPEGVSGSITHSGTQAMAVVVSHPDALVGIDCEAILPDREAREIQDGIIDAQEAMCLTHSGYPFALALTLTFSAKESLFKAFFPQVKTFMGFEWARVTELTEKTITLALSHPAGDYPEGKCFPLIWQNNDTSVWTLLKA

SEQ ID NO: 93055 - protein, 1285 aa, Enterobacter cloacae
  REGION 1..1285: note = tr|A0A4Q4A2R7|A0A4Q4A2R7_ENTCL Enterobactin non-ribosomal peptide synthetase EntF OS=Enterobacter cloacae OX=550 GN=entF PE=4 SV=1
MNRLPLVAAQPGIWMAEQLSSLPNAWSVAHYTELKGNIDAPLLAKAIAEGMMQADTLRTRFAEDNGEVWQWVDETLILPEPSIVRVDSHDAAVALMEADLSQDLRVDSGQPLAFHQLIQVGDNRWYWYQRYHHLVVDGFSFPAITRQIAAIYAAWKKGEPTPASPFTPFAEVVDEYQRYRDSEAWQRDGAFWAGQRKQLPPPVSLSSAPLPGRAATTDILRLKIAMDARAFSQLAQAAGQAQRTDLALALAALWLGRLTGRLDYAAGFIFMRRMGSAALTATGPVLNVLPLAVNINPLESLPELALRLANQLKKMRRHQRYDAEQIVRDSGRAAGDEPLFGPVLNVKVFDYQLDIDGVEAITHTLATGPVNDLELALFPDEQGGLSIEILANRQRYDDATLRRHVSRLNAMLTQFAANPDLRCGDVETVSEQEYARLARINDTGLALPSTTLADLVAEQANKTPDAPALADAHIELNYRQMREQVVALATLLRARGVKPGDSVAVALPRSVFLTLALHGIVEAGAAWLPLDTGYPDDRLRMMLEDAKPSLLITTDAQLPRFNDLPIPSLSYNMLLPTTDAEPLRLAKPEQTAYIIFTSGSTGRPKGVMVGHTAIVNRLKWMQDHYPLAADDVVAQKTPCSFDVSVWEFWWPFIAGAKLVMAEPDAHRDPQAMQSFFAEYGVTTTHFVPSMLAAFVASLTPENVDCCRTLKQVFCSGEALPTALCREWEQLTHVPLHNLYGPTEAAVDVSWYPAYGPELAAVEGNSVPIGFPVWNTGLRILDAMMRPVPFGVSGDLYLTGIQLAQGYLGRPDLTASRFIADPFAPGERMYRTGDVARWLDNGAVEYLGRSDDQLKIRGQRIELGEIDRAMLSLPDVAQAVAHACVFNQAAATGGDARQLVGYVVSESGLPLDRDALLDSLRAQLPPHMVPVVLLQISALPLSANGKLDRKALPLPELTSKTSGRAPETQTEAAVAQAFSALLGCEVNDIDADFFALGGHSLLAMRLAAQLGRAFSRKVMPGQIMVASTVGKLSALLDSQLSDEQAQRLGYETLLPLRESNGPTLFCFHPASGFAWQFSVLARYLSPRWSIVGIQSPRPNGPMQQCADLDGVIEHHLKTLRKQQPQGPYYLFGYSLGGTLAQGIAARLREQGEAVAFLGLLDTWPPETQNWAEKEANGLDPEVLAEIERERQAFIAAQQGQGSSELFNTIEGNYADAVRLLTTAHSSRFDGKATLFVAERTRTMDPHTAWAPWVGELEVYSQDCAHVDIISPQAFEKIGPVLKEILE

SEQ ID NO: 93056 - protein, 259 aa, Enterobacter hormaechei
  REGION 1..259: note = tr|A0A4S2WYY5|A0A4S2WYY5_9ENTR Enterobactin synthase subunit EntD OS=Enterobacter hormaechei OX=158836 GN=entD; PE = 3 SV=1
MHTTHSTFSLAGHTLHRITFDPTTFTDADLLWLPHHAQLANAGRKRKADHLAGRIAAAHALPDYTMPAIGPSGEPLWPQDISGSITHSGTQAIAVVTQYPVLIGIDCETILSENEAREIKDGIIDTQEEPVLSRLGYPFALALTLVFSAKESLFKALFPQVQAWMGFDCARVTKLDDKTLTLALTCQLADFQEGTAFPLHWQQHGEQVITLLSHAPATSLHAGHHKRHDKHHREQDHNGRRRRAVEIKRGIHAAYRHQR

SEQ ID NO: 93057 - protein, 1285 aa, Enterobacter kobei
  REGION 1..1285: note = tr|A0A5A9B9Z7|A0A5A9B9Z7_9ENTR Enterobactin non-ribosomal peptide synthetase EntF OS=Enterobacter kobei OX=208224 GN=entF PE=3 SV=1
MSRLPLVAAQPGIWMAEQLSALPNAWSVAHYTELKGDIDAPLLAKAIAEGMMQADTLRMRFAEDNGEVWQWVDETVMLPEPSIVRVDSHDAAVALMEADLNQNLRVDSGQPLAFHLLIQVGEERWYWYQRYHHLVVDGFSFPAITRQITAIYAAWKKGDPTPSSPFSPFAEVVEEYQRYRESEAYARDGDFWAAQRRKLPPPVSLSSVPLPGRAATTDILRLKIVADSSAFSQLAQAAGQAQRTDLALALVALWLGRLTGRLDYAAGFIFMRRMGSVALTATGPVLNVLPLAVNIDPQESLPGLALRLASQLKKMRRHQRYDAEQILRDSGKAAGDEALFGPVLNVKVFDYQLELDGVEAITHTLATGPVNDLELALFPDEQGGLSIEILASKQRYDETTLKGHVARLNAMLVQFAANPDLRCGEVETVSEQEYAQLARINDTGLALPSTTLAELVAEQASRTPDAPALADAHIELNYRQMREQVVALANLLRARGVKPGDSVAVALPRSVFLTLALHGIVEAGAAWLPLDTGYPDDRLRMMLEDAKPSLLITTDEQLPRFSELPIASFSYNMLLPAAGTQPLRVAKPEQTAYIIFTSGSTGRPKGVMVGHTAIVNRLKWMQNHYPLTANDVVAQKTPCSFDVSVWEFWWPFIAGAKLVMAEPDAHRDPQAMQSFFARYGVTTTHFVPSMLAAFVASLTPENVDCCRTLKQVFCSGEALPTGLCREWEQLTRAPLHNLYGPTEAAVDVSWYPAFGPELAAVEGNSVPIGFPVWNTGLRILDALMRPVPFGVAGDLYLTGIQLAQGYLGRPDLTASRFIADPFAPGERMYRTGDVARWLDNGAVEYLGRSDDQLKIRGQRIELGEIDRAMLSLPDVAQAVAHACVFNQAAATGGDARQLVGYVVSESGLPLDRDALLESLKAQLPPHMVPVVMLQLSALPLSANGKLDRKALPLPELTSKTTGRAPETDTEIGVAQAFAALLGCEVNDIEADFFALGGHSLLAMRLAAQLSSTFARKVTPGQIMVASTVSKLSALLDLKMNDEQAQRLGYEAVLPLRESHGPTLFCFHPASGFAWQFSVLARYLSPRWSITGIQSPRPEGPMQQCADLDGVIDHHLNTLRKQQPQGPYYLFGYSLGGTLAQAIAARLRAQGEAVAFLGLLDTWPPETQNWAEKEANGLDPAALAEIERERQAFIAAQQGQGSSELFGAIEGNYADAVRLLTTAHSARFDGKATLFVAERTRTMDPQIAWAPWVAELEVHSQDCAHVDIISPQAFEKIGPVLKGILG

SEQ ID NO: 93058 - protein, 228 aa, Enterobacter ludwigii
  REGION 1..228: note = tr|A0A5A9AT43|A0A5A9AT43_9ENTR Enterobactin synthase subunit EntD OS=Enterobacter ludwigii OX=299767 GN=entD; PE = 3 SV=1
MRTTHSTFRLAGTTVHQITFDPTTFTDADLLWLPHHNALAHAAPKRKAEHLAGRLAAAHALQEYGSTAIPAIGSSGEPLWPDGMTGSISHTASRALAVVTPHGLTGIDGEIILADDEAVEIKDGIIGPAEDSLLRHTGLPFAQALTLTFSAKESLFKALFSQVNAMMGFDCARVTALDENTLTLALTRPLAGFSQDDAFTLFWLRDGNTQITLLPPFPAASRKSSSRR

SEQ ID NO: 93059 - protein, 218 aa, Enterobacter sp.; identical to SEQ ID NO: 93054
  REGION 1..218: note = tr|A0A4S3EN25|A0A4S3EN25_9ENTR Enterobactin synthase subunit EntD OS=Enterobacter sp. AD2-3 OX=2547834 GN=entD; PE = 3 SV=1

SEQ ID NO: 93060 - protein, 221 aa, Enterobacter sp.
  REGION 1..221: note = tr|A0A5J6W9A6|A0A5J6W9A6_9ENTR Enterobactin synthase subunit EntD OS=Enterobacter sp. E76 OX=2596949 GN=entD; PE = 4 SV=1
MNTELTTLALNQRTLFCLRFAPDSFAAQDLLWLPHHPMLARAVMSRKAEHLAGRIAAVHALRHAGSPATPPGIGAHREPLWPAGFTGSITHAGNLALAAVKPTGERFSSLGIDYQPLLTANDAQKLADGVLSGDERARIQAASVPFHLALSLIFSAKESLFKALFPAVQNWFGFECAQAVALTSDTVTLELTCPLGPFIIGSRFTLGWLPFGDGIVTLADL

SEQ ID NO: 93061 - protein, 229 aa, Enterobacter sp.
  REGION 1..229: note = tr|A0A5C1CT74|A0A5C1CT74_9ENTR Enterobactin synthase subunit EntD OS=Enterobacter sp. LU1 OX=1848517 GN=entD; PE = 3 SV=1
MHTTHSTFSLAGHTLHRITFDPATFTDADLLWLPHHAQLADAGRKRKADHLAGRIAAAHALPDHTMPAIGPSGEPLWPQGISGSITHSGTQAIAVVTQYPALIGIDCETILFENEAREIKDGIIDTQEEPVLSRQGYPFALALTLVFSAKESLFKALFPQVQAWMGFDCARVTKLDDKTLTLALTRQLAGFEEGTAFRLHWQQHGEQVITLLSHAPGDEPSRWSPQTSR

SEQ ID NO: 93062 - protein, 229 aa, Enterobacter sp.
  REGION 1..229: note = tr|A0A5D9BMA8|A0A5D9BMA8_9ENTR Enterobactin synthase subunit EntD OS=Enterobacter sp. RVSM5a OX=2605743 GN=entD; PE = 3 SV=1
MHTTHSTFSLAGHTLHRITFDPATFSDADLLWLPHHAQLADAGRKRKADHLAGRIAAAHALPDHTMPAIGPSGEPLWPQGISGSITHSGTQAIAVVTQYPALIGIDCETILFENEAREIKDGIIDTQEEPVLSRQGYPFALALTLVFSAKESLFKALFPQVQAWMGFDCARVTKLDDKTLTLALTRQLAGFEEGTAFRLHWQQHGEQVITLLSHAPGDEPSRWSPQTSR

SEQ ID NO: 93063 - protein, 1285 aa, Enterobacter sp.
  REGION 1..1285: note = tr|A0A4R0GAY0|A0A4R0GAY0_9ENTR Enterobactin non-ribosomal peptide synthetase EntF OS=Enterobacter sp. WCHEs120002 OX=2529381 GN=entF PE=4 SV=1
MNRLPLVAAQPGIWMAEQLSTLPNAWSVAHYTELNGDIDAPLLAKAVAAGMMQADTLRTRFAEDNGEVWQWVDASMMLPEPSIVRVDSHAAAAALMEADLNQNLRVDSGQPLAFHQLIQVGENRWYWYQRYHHLVVDGFSFPAITRQIAAIYRAWKNGESTPESPFTPFSEVVEEYQRYRDSEAYARDGAFWAEQRRQLPSPVSLSAAPLPGRAATTDILRLKIAMDGRAFSQLAQAAGQAQRTDLALALVALWLGRLTGRLDYAAGFIFMRRMGSAALTATGPVLNVLPLAVNINPQESLPALALRLANQLKKMRRHQRYDAEQIVRDGGRAAGEDALFGPVLNVKVFDYQLDIDGVEAITHTLATGPVNDLELALFPDEQGGLSIEILANKQRYDEATLSRHVARLNAMLLQFAANPDLRCGEVETVSEQEYAQLARINDTGLALPSTTLAELVAEQASKTPDAPALADAHVELSYRQMREQVVALANLLRARGVKPGDSVAVALPRSVFLTLALHGIVEAGAAWLPLDTGYPDDRLRMMLEDAKPSLLITTDEQLPRFSDLPITAFSYNTLLPAAEAEPLRLATPEQTAYIIFTSGSTGRPKGVMVGHTAIVNRLKWMQDHYPLDATDVVAQKTPCSFDVSVWEFWWPFIAGAKLVMAEPDAHRDPQAMQSFFARYGVTTTHFVPSMLAAFVASLTPENAACCNTLKQVFCSGEALPTELCREWEELTHAPLHNLYGPTEAAVDVSWYPAFGPELAGVEGNSVPIGFPVWNTGLRILDAMMRPVPFGVAGDLYLTGIQLAQGYLGRPDLTASRFIADPFAPGERMYRTGDVARWLDNGAVEYLGRSDDQLKIRGQRIELGEIDRAMLSLPDVAQAVAHACVFNQAAATGGDARQLVGYVVSESGLPLDRDALLESLKAQLPPHMVPVVLLQISALPLSANGKLDRKALPLPELTSKTTGRAPETETESAVAQAFSALLGCEVNDIEADFFALGGHSLLAMRLAAQLSRAFDRKVTPGQIMVASTVSKLSALLDSQMSDEQAQRLGYETLLPLREGNGPTLFCFHPASGFAWQFSVLARYLSPRWSITGIQSPRPDGPMQQRAYLDGVIEHHLATLRKQQPQGPYYLFGYSLGGTLAQAIAARLRELGEEVAFLGLLDTWPPETQNWAEKEANGLDPEVLAEIERERQAFIAAQQGQGSSELFNAIEGNYADAVRLLTTAHSARFDGKATLFVAERTRTMDPQVAWSPWVAELEVYSQDCAHVDIISPQAFEKIGPVLKEILG

SEQ ID NO: 93064 - protein, 1285 aa, Enterobacter sp.
  REGION 1..1285: note = tr|A0A4R0G1B0|A0A4R0G1B0_9ENTR Enterobactin non-ribosomal peptide synthetase EntF OS=Enterobacter sp. WCHEs120003 OX=2529382 GN=entF PE=4 SV=1
MNRLPLVAAQPGIWMAEQLSSLPNAWSVAHYTELKGNIDAPLLAKAIAQGMMQADTLRTRFAEDNGEVWQWVDETLILPEPSIVRVDSHDAAVALMEADLSQDLRVDSGQPLAFHQLIQVGDNRWYWYQRYHHLVVDGFSFPAITRQIAAIYAAWKKGEPTPASPFTPFAEVVDEYQRYRDSEAWQRDGAFWAGQRKQLPPPVSLSSAPLPGRAATTDILRLKIAMDARAFSQLAQAAGQAQRTDLALALVALWLGRLTGRLDYAAGFIFMRRMGSAALTATGPVLNVLPLAVNINPLESLPELALRLANQLKKMRRHQRYDAEQIVRDSGRAAGDEPLFGPVLNVKVFDYQLDIDGVEAITHTLATGPVNDLELALFPDEQGGLSIEILANRQRYDDATLKRHVSRLNAMLTQFAANPDLRCGDVETVSEQEYARLARINDTGLALPSTTLADLVAEQANKTPDAPALADAHIELNYRQMREQVVALATLLRARGVKPGDSVAVALPRSVFLTLALHGIVEAGAAWLPLDTGYPDDRLRMMLEDAKPSLLITTDTQLPRFNDLPIPSLSYNMLLPTTDAEPLRLAKPEQTAYIIFTSGSTGRPKGVMVGHTAIVNRLKWMQDHYPLAADDVVAQKTPCSFDVSVWEFWWPFIAGAKLVMAEPDAHRDPQAMQSFFAEYGVTTTHFVPSMLAAFVASLTPENVDCCRTLKQVFCSGEALPTALCREWEQLTHVPLHNLYGPTEAAVDVSWYPAYGPELAAVEGNSVPIGFPVWNTGLRILDAMMRPVPFGVAGDLYLTGIQLAQGYLGRPDLTASRFIADPFAPGERMYRTGDVARWLDNGAVEYLGRSDDQLKIRGQRIELGEIDRAMLSLPDVAQAVAHACVFNQAAATGGDARQLVGYVVSESGLPLDRDALLDSLRTQLPPHMVPVVLLQISALPLSANGKLDRKALPLPELTSKTSGRAPETQTEAVVAQAFSALLGCEVNDIDADFFALGGHSLLAMRLAAQLGRAFSRKVTPGQIMVASTVGKLSALLDSQLSDEQAQRLGYETLLPLRESNGPTLFCFHPASGFAWQFSVLARYLSPRWSIVGIQSPRPNGPMQQCADLDGVIEHHLKTLRKQQPQGPYYLFGYSLGGTLAQGIAARLREQGEAVAFLGLLDTWPPETQNWAEKEANGLDPEVLAEIERERQAFIAAQQGQGSSELFNTIEGNYADAVRLLTTAHSSRFDGKATLFVAERTRTMDPHTAWAPWVGELEVYSQDCAHVDIISPQAFEKIGPVLKEILE

SEQ ID NO: 93065 - protein, 206 aa, Enterococcus durans
  REGION 1..206: note = tr|A0A557ZLJ0|A0A557ZLJ0_9ENTE Enterobactin synthase subunit EntD OS=Enterococcus durans OX=53345 GN=entD PE=3; SV = 1
MKTTHTSLPFAGHTLHFVEFDPANFCEQDLLWLPHYAQLQHAGRKRKAEHLAGRIAAIYALREYGYKCVPAIGELRQPVWPAEVYGSISHCGATALAVVSRQPIGVDIEEIFSAQTATELTDNIITPAEHERLADCGLAFSLALTLAFSAKESAFKASEIQTDAGFLDYQIISWNKQQVIIHRENEMFAVHWQIKEKIVITLCQHD

SEQ ID NO: 93066 - protein, 1293 aa, Escherichia albertii
  REGION 1..1293: note = tr|A0A4Q9IUU4|A0A4Q9IUU4_9ESCH Enterobactin non-ribosomal peptide synthetase EntF OS=Escherichia albertii OX=208962 GN=entF PE=4 SV=1
MSQHLPLVAAQPGIWMAEKLSDLPSAWSVAHYVELTGDVDVPLLARAVVAGLAQADTLRMRFTEDNGEIWQWVDDALTFEQPEIIDLRTNIDPHGTALALMQADLQQNLRIDSGNQLVFHKLIQVEDNRWYWYQRYHHLLVDGFSFPAITRQIANIYCAWLRGEPTPVSPFTSFTDVVEEYQQYRESEAWQRDAAFWADQRRQLPPPASLSPAPLPGRSASADILRLKLEFTDGEFRQLAAQLPTVQRTDLALALAALWLGRLCNRMDYAAGFIFMRRMGSVALTATGPVLNVLPLGIHIEARETLPQLATRLAAQLKKMRRHQRYDAEQIVRDSGRAAGEEPLFGPVLNIKVFDYQLDIPGMRAQTHTLATGPVNDLELALFPDENGDLSIEILANKQRYDESTLIQHAERLKMLIAQFAATPALLCGDVDIMLPDEYEQLAQINATQVEIPETTLSALVAEQAAKTPDAPALADAHYQFSYREMREQVVALANLLRERGVKPGDSVAVALPRSVFLTLALHAIVEAGAAWLPLDTGYPDDRLKMMLEDARPSLLITTDEQLPRFRDIPNLTNLCYNAPLTPQGSAPLQLSQPYHTAYIIFTSGSTGRPKGVMVGQKAIVNRLLWMQNHYSLTGEDVVAQKTPCSFDVSVWEFFWPFIAGAKLVMAAPEAHRDPLAMQQFFAEYGVTTTHFVPSMLAAFVASLTPETARQCCATLKQVFCSGEALPTDLCREWQQLTNVPLHNLYGPTEAAVDVSWYPAFGAELAAVRGSSVPIGYPVWNTGLRILDAMMHPVPPGVAGDLYLTGIQLAQGYLGRPDLTASRFIADPFAPGERMYRTGDVARWLENGAVEYLGRSDDQLKIRGQRIELGEIDRVMQALPDVEQAVTHACVINQAAATGGDARQLVGYLVSQSGLPLDIPALQAQLRETLPPHMVPVVLLQLPQLPLSANGKLDRKALPLPELKAQTPGRAPKAGSETIIAGAFSSLLGCDVQDADADFFALGGHSLLAMKLAAQLSRQFARQVTPGQVMVASTVAKLATVIDGEEESAHRLGFETLLPLRESKGPTLFCFHPASGFAWQFSVLSRYLDPQWSIIGIQSPRPNGLMQTATNLDEVCEAHLATLLQQQPHGPYYLLGYSLGGSLALGIAARLRARGEQVAFLGLLDTWPPETQNWHEKEANGLDPEVLAEINREREAFLAAQQNYASTELFTTIEGNYADAVRLLTTAHSVPFDGKATLFVAERTVQEGVNPERVWAPWIAELDIYPQDCAHVDIISAVAFEKIGPIIRAALNK

SEQ ID NO: 93067 - protein, 536 aa, Escherichia coli
  REGION 1..536: note = sp|P10378|ENTE_ECOLI Enterobactin synthase component E OS=Escherichia coli (strain K12) OX=83333 GN=entE PE=1; SV = 3
MSIPFTRWPEEFARRYREKGYWQDLPLTDILTRHAASDSIAVIDGERQLSYRELNQAADNLACSLRRQGIKPGETALVQLGNVAELYITFFALLKLGVAPVLALFSHQRSELNAYASQIEPALLIADRQHALFSGDDFLNTFVTEHSSIRVVQLLNDSGEHNLQDAINHPAEDFTATPSPADEVAYFQLSGGTTGTPKLIPRTHNDYYYSVRRSVEICQFTQQTRYLCAIPAAHNYAMSSPGSLGVFLAGGTVVLAADPSATLCFPLIEKHQVNVTALVPPAVSLWLQALIEGESRAQLASLKLLQVGGARLSATLAARIPAEIGCQLQQVFGMAEGLVNYTRLDDSAEKIIHTQGYPMCPDDEVWVADAEGNPLPQGEVGRLMTRGPYTFRGYYKSPQHNASAFDANGFYCSGDLISIDPEGYITVQGREKDQINRGGEKIAAEEIENLLLRHPAVIYAALVSMEDELMGEKSCAYLVVKEPLRAVQVRRFLREQGIAEFKLPDRVECVDSLPLTAVGKVDKKQLRQWLASRASA

SEQ ID NO: 93068 - protein, 206 aa, Escherichia coli
  REGION 1..206: note = tr|A0A5C2P790|A0A5C2P790_ECOLX Enterobactin synthase subunit EntD OS=Escherichia coli O157 OX=1045010 GN=entD; PE = 3 SV=1
MKTTHTSLPFAGHTLHFVEFDPANFCEQDLLWLPHYAQLQHAGRKRKTEHLAGRIAAVYALREYGYKCVPAIGELRQPVWPAEVYGSISHCGATALAVVSRQPIGVDIEEIFSAQTATELTDNIITPAEHERLADCGLAFSLALTLAFSAKESAFKASEIQTDAGFLDYQIISWNKQQVIIHRENEMFAVHWQIKEKIVITLCQHD

SEQ ID NO: 93069 - protein, 536 aa, Escherichia coli
  REGION 1..536: note = sp|Q8XBV3|ENTE_ECO57 Enterobactin synthase component E OS=Escherichia coli O157:H7 OX=83334 GN=entE PE=3 SV=1
MSIPFTRWPEEFARRYREKGYWQDLPLTDILTRHAASDSIAVIDGERQLSYRELNQAADNLACSLRRQGIKPGETALVQLGNVAELYITFFALLKLGVAPVLALFSHQRSELNAYASQIEPALLIADRQHALFSGDDFLNTFVAEHSSIRVVQLLNDSGEHNLQDAINHPADGFTATPSPADEVVYFQLSGGTTGTPKLIPRTHNDYYYSVRRSVEICQFTQQTRYLCAIPAAHNYAMSSPGSLGVFLAGGTVVLAADPSATLCFPLIEKHQINVTALVPPAVSLWLQALTEGESRAQLASLKLLQVGGARLSATLAARIPAEIGCQLQQVFGMAEGLVNYTRLDDSAEKIIHTQGYPMCPDDEVWVADAEGNPLPQGEVGRLMTRGPYTFRGYYKSPQHNASAFDANGFYCSGDLISIDPEGYITVQGREKDQINRGGEKIAAEEIENLLLRHPAVIYAALVSMEDELMGEKSCAYLVVKEPLRAVQVRRFLREQGIAEFKLPDRVECVDSLPLTAVGKVDKKQLRQWLASRASA

SEQ ID NO: 93070 - protein, 206 aa, Escherichia sp.
  REGION 1..206: note = tr|A0A4P9DCM6|A0A4P9DCM6_9ESCH Enterobactin synthase subunit EntD OS=Escherichia sp. E4742 OX=2044467 GN=entD; PE = 3 SV=1
MKTTHTALPFAGHTLHFVEFDPASFREQDLLWLPHYAQLQHAGRKRKTEHLAGRIAAVYALREYGYKCVPAIGELRQPVWPAEVYGSISHCGTTALAVVSRQPIGIDIEEIFSAQTAAELTDNIITHTEHEIITGCDLPFPMALTLAFSAKESAFKASKLQTEQGFLNYQIINWNKQQIIIRRDGEKFAVHWQIKEKIVITLCQHD

SEQ ID NO: 93071 - protein, 206 aa, Escherichia sp.
  REGION 1..206: note = tr|A0A4U6BWN7|A0A4U6BWN7_9ESCH Enterobactin synthase subunit EntD OS=Escherichia sp. MR OX=2575922 GN=entD PE=3; SV = 1
MKTTHTSLPFAGHTLHFVEFDPVSFREQDLLWLPHYAQLQHAGRKRKAEHLAGRIAAVHALREFGFKYVPPVGERRQPLWPAGLYGSISHCQATALAVVSHQPMGIDIEEIFSAQAAEELKDSIMTPAEYELLVVSNLPFSVVLTLAFSAKESAFKASKLQTDQGFLDYQIVNWNKQRIIICWENEIFAVQWQIRGKQLITLCQHD

SEQ ID NO: 93072 - protein, 290 aa, Halomonas elongata
  REGION 1..290: note = tr|E1V3P2|E1V3P2_HALED Enterobactin synthase component EntB OS=Halomonas elongata (strain ATCC 33173 / DSM 2581 / NBRC 15536 / NCIMB 2198 / 1H9) OX=768066; GN = entB PE =4 SV=1
MAIPHLPDYPLPTASDLPDNRAAWQAEASRSVLLIHDMQEHFIGFYGDDSLLVQRLIENIVRLRDWCHEQGIPVVYTAQPSDQPPSDRALLNDFWGPGLTEADPGRQAIVSALTPAEGETVLTKWRYSAFQRSELRTLMQEWGRDQLLITGVYAHIGCLATALEAFMVDIQAFMVGDAVADFSAEEHHMALNYVASRCGCVTALGDLVGDTSNQPSRDWLRHRVTRLIDGDVTAVAADENLLDYGLDSLQVMNLVAELKTLGVTLSFEELTRTPTLEAWWTLIEQKRLAA

SEQ ID NO: 93073 - protein, 1293 aa, unidentified
  source 1..1293: note = Klebsiella aerogenes
  REGION 1..1293: note = tr|A0A5A8WWN0|A0A5A8WWN0_KLEAE Enterobactin non-ribosomal peptide synthetase EntF OS=Klebsiella aerogenes OX=548 GN=entF PE=4 SV=1
MSTRLPLVAAQPGIWMAERLSTLPGAWSVAHYVELRGNLDPALLSKAIVAGLKQADTLSMRFCEDNGEAWQWVDDAREFAEPQSVDLRQQADPHMSALTLMQSDLGQNLRVDSGNPLVCHQLMRVGDDCWYWYQRYHHLLVDGFSFPAITRQIAAIYRAWQRGEETPDSPFTPFAEVVEEYQRYYGSEAWQRDKAFWQAQRQALPSPASLSDAPLAGRATSSDIWRLKLEADPAVFSQLAASAPQCQRADLALAMTTLWLGRLCGRMDYAAGFIFMRRMGSAALTATGPVLNVLPLAVNIDAQETLAQLATRLSGQLKKMRRHQRYDAEQIVRDSGKAAGDEPLFGPVLNIKVFDYQLDIDDVQAQTHTLATGPVNDLELALFPDERGGLSLEILANKARYDEATLNRHVSRLTALLAQFAANPALRCGEAEMLSAEEGAQLALINNTAMPLPTTTLSALVAEQARKTPDAPALADASWRFSYREMRQQVVALANLLQQRGVKPGDSVAVALPRSVFLTLALHGIVEAGAAWLPLDTGYPDDRLRMMLEDAQPSLLITSDDQLARFSDIPGLTSLCYEQPLAAEDDTPLALSKPEHTAYIIFTSGSTGRPKGVMVGQTAIVNRLLWMQNHYPLTAADVVAQKTPCSFDVSVWEFWWPFMTGAQLVMAAPEAHRDPQAMQRFFAQYGVTTTHFVPSMLAAFVASLDSDNVSSCRTLKRVFCSGEALPTELCREWERLTGAPLHNLYGPTEAAVDVSWYPACGPELAAVTGTSVPIGWPVWNTGLRILDAAMRPVPPGVAGDLYLTGIQLAQGYMGRPDLTASRFIADPFAPGERMYRTGDVARWLDNGAVEYLGRSDDQLKIRGQRIELGEIDRVMAALPDVAQAVCHACVFNQAAATGGDARQLVGYLVSESGQPLDVAALKARLSEQLPPHMVPVVLIQLESFPLSANGKLDRKALPLPSLSSERSGRPPQSATEMAVAAAFSQLLGCEVNDIDADFFALGGHSLLAMRLAAQLSRELARQVTPGQVMVASTVGKLSALLASDLSDEQAQRLGFDALLPLRESDGPTLFCFHPASGFAWQFSVLARYLNPRWSITGIQSPRPTGPMASAANLDEVCEHHLRTLLAQQPHGPYYLFGYSLGGTLAQGIAARLRQRGEEVAFLGLLDTWPPETQNWAEKEANGLDPEVLAEIAREREAFLAAQQGQASGELFSAIEGNYADAVRLLTTAHSAKFDGKATLFVAEKTRQKGMDPQVAWGPWVGELEVFSQNCAHVEIISPQAFEAIGPVVREILG

SEQ ID NO: 93074 - protein, 1295 aa, unidentified
  source 1..1295: note = Klebsiella grimontii
  REGION 1..1295: note = tr|A0A5A8XVX0|A0A5A8XVX0_9ENTR Enterobactin non-ribosomal peptide synthetase EntF OS=Klebsiella grimontii OX=2058152 GN=entF PE=4 SV=1
MTTRLPLVAAQPGIWMAERLSTLPGAWSVAHYVELRGDIDPVLLGRAIITGLSQADTLSMRFCEDSGEAWQWVDERRVFAEPDYQDLRAASDPHAAALARMQADLGQNLRVDGGNPLVCHQLLRVGDNRWYWYQRYHHLLVDGFSFPAITRQIAAIYRAWQRGEETPASPFTPFAEVVEEYQRYYGSDAWQRDKAFWQAQRQALPSPASLSDAPLAGRATSSDIWRMKLEVDAGVFSRLAASAPQCQRADLALALTALWLGRLCSRTEYAAGFIFMRRMGSSALTATGPVLNVLPLAVTIDAGETLPELAARLAGQLKKMRRHQRYDAEQIVRDSGKAAGDEPLFGPVLNIKVFDYQLDIDGVQAITHTLATGPVNDLELALFPDEAGGLSLEVLANKQRYDKQTLGNHIARLSALLAQFADNPALRCGDVNMLSAAEAEQLQRVNATAVDLPLTTLSARVAEQAAKTPDAPALADGRWQFSYREMRQQVVALAEQLRARGVKPGDSVAVALPRSVFLTLALHGIVEAGAAWLPLDTGYPDDRLRMMLEDARPSLLITSEDQRARFSDIPGLESLCYQQPLAAADAAPLALSRPEHTAYIIFTSGSTGRPKGVMVGQTAIVNRLLWMQDHYPLTADDVVAQKTPCSFDVSVWEFWWPFIAGAQLVMAEPEAHRDPLAMQQFFARYGVTTTHFVPSMLAAFVASLNTENVASCHTLRRVFCSGEALPTALCREWEELTGAPLHNLYGPTEAAVDVSWYPACGPELAAVTGASVPIGWPVWNTGLRILDASMRPVPPGVAGDLYLTGIQLAQGYLGRPDLTASRFIADPYAPGERMYRTGDVARWLDNGAVEYLGRSDDQLKIRGQRIELGEIDRAMSALPDVAQAVAHACVFNQAAATGGDARQLVGYLVSESGLPLDTEALKARLGEQLPPHMVPVVLIQLPALPLSANGKLDRKALPLPTLSRVSRGRPPEPGVETTVASAFSQLLGCEVNDIDADFFALGGHSLLAMRLAATLGRELQRQVTPGQVMVASTVGKLSALLASDLSDEQAQRLGFDAILPLRASDGPTLFCFHPASGFAWQFSVLARYLSPRWSIVGIQSPRPHGPMATAADLDAVCEHHLQTLLSQQPHGPYYLLGYSLGGTLAQGIAARLRQRGEAVAFLGLLDTWPPETQNWAEKEANGLDPEVLAEIAREREAFLAAQQGQASGELFSVIEGNYADAVRLLTTAHSAKFDGKATLFVAEKTRQPGMEPQRVWGPWVGELEVFSQDCAHVDIISPQAFEAIGPVVREILGEG

SEQ ID NO: 93075 - protein, 207 aa, unidentified
  source 1..207: note = Klebsiella michiganensis
  REGION 1..207: note = tr|A0A443W849|A0A443W849_9ENTR Enterobactin synthase subunit EntD OS=Klebsiella michiganensis OX=1134687; GN = entD PE=3 SV=1
MQTQRSIIQLADRSLQRVDFDPLTFRPEDLLWLPHHARLSGCARKRQSEHLAGRIAAVYALREVGETEIPAIGDQRQPLWPAPWYGSISHCERSALAVVSAGPVGVDIERILSPALAAELESSIVNSAEKSLLDASGLPSALALTLAFSAKESAFKASPPEIQNGVGFSDFEVTYIKEGNLLLRLSAGEYRLQWIKAGDYVITLCAT

SEQ ID NO: 93076 - protein, 1293 aa, Klebsiella oxytoca
  REGION 1..1293: note = tr|A0A5F2FK21|A0A5F2FK21_KLEOX Enterobactin non-ribosomal peptide synthetase EntF OS=Klebsiella oxytoca OX=571 GN=entF PE=4 SV=1
MTTRLPLVAAQPGIWMAERLSTLPGAWSVAHYVELRGDIDPTLLGRAIVTGLSQADTLSMRFCEDNGEAWQWVDENRHFAEPDYRDLRTSHDPHAAALALMQADLGQNLRVDGGNPLVCHQLLRVGDKCWYWYQRYHHLLVDGFSFPAITRQIAAIYRAWQRGEETPASPFTPFAEVVEEYQRYYGSDAWQRDKQFWQAQRQALPAPASLSDAPLAGRATSTDIWRMKLEVDAGVFSRLAAGAPQCQRADLALALTALWLGRLCSRMDYAAGFIFMRRMGSAALTATGPVLNVLPLAVNIDARETLAELAMRLAGQLKKMRRHQRYDAEQIVRDSGRAAGDEPLFGPVLNIKVFDYQLDIDGVQAITHTLATGPVNDLELALFPDETGGLSLEVLANKQRYDEQTLRGHIARLSSLLTQFADNPTLPCGEANMLSAAENQRLAQVNATAVDLPLTTLSALVAAQAAKTPDAPALADGCWQFSYREMRQQVVALAERLRARGVKPGDSVAVALPRSVFLTLALHGIVEAGAAWLPLDTGYPDDRLRMMLEDARPSLLITSEDQLARFSDIPGLESLCYQQPLAAGESAPLALSQPEHTAYIIFTSGSTGRPKGVMVGQTAIVNRLLWMQDHYPLCAEDVVAQKTPCSFDVSVWEFWWPFIAGAQLVMAEPEAHRDPLAMQQFFARYGVTTTHFVPSMLAAFVASLEAENVDCCQTLRRVFCSGEALPTALCREWEQLTGAPLHNLYGPTEAAVDVSWYPACGPELAAVTGASVPIGWPVWNTGLRILDAAMRPVPPGVAGDLYLTGIQLAQGYLGRPDLTASRFIADPYAPGERMYRTGDVARWLDNGAVEYLGRSDDQLKIRGQRIELGEIDRALSALPDVAQAVAHACVFNQAAATGGDARQLVGYLVSASGLPLDTAALKAQLGEQLPPHMVPVVLIQLPALPLSANGKLDRKALPLPTLSSERSGRPPEPGVETAVAAAFSQLLGCEVNDIDADFFALGGHSLLAMRLAALLSRELERQVTPGQIMVASSVGKLSALLASDLSDEQAQRLGFDAVLPLRESDGPTLFCFHPASGFAWQFSVLARYLSPRWSIVGIQSPRPQGPMATAADLDAVCEHHLQTLLSQQPRGPYYLFGYSLGGTLAQGIAARLRQRGEAVAFLGLLDTWPPETQNWAEKEANGLDPEVLAEIAREREAFLAAQQGQASGELFSVIEGNYADAVRLLTTAHSAKFDGKATLFVAEKTRQPGMDPQVVWGPWIGELEVFSQDCAHVDIISPQAFEAIGPVVREILG

SEQ ID NO: 93077 - protein, 1293 aa, Klebsiella pneumoniae
  REGION 1..1293: note = tr|A0A486Q773|A0A486Q773_KLEPN Enterobactin non-ribosomal peptide synthetase EntF OS=Klebsiella pneumoniae OX=573 GN=entF PE=4 SV=1
MTTRLPLVAAQPGIWMAERLSTLPGAWSVAHYVELRGALDPTLLGKAIVAGLQQADTLSLRFEEEEGEVWQWVAADRTFGEPSIIDLRTAPDPHRAATERMQADLAQDLRVDGGNPLVCHQLLRVGDDRWYWYQRYHHLLVDGFSFPAITRQIAAIYRAWQRGEATPESPFTPFAEVVDEYQRYAGSEAWQRDKAFWQAQRQALPAPASLSAAPLGGRAAGSDIWRMKLEMNADAFRRLASHAPQCQPADLALALTTLWLGRLCNRMDYAAGFIFMRRMGSAALTSTGPVLNVLPLAVHIDARETLADLAMRLAAQLKKMRRHQRYDAEQIVRDSGKAAGDEPLFGPVLNVKVFDYQLDIDGVQAVTHTLATGPVNDLELALFPDETGGLSLEILANKARYDEAELRRHMARLTALLAQFAADPTLRCGEAEMLSADELARLAAVNDTAVPLPATTLSALVADQARKTPDAPALADARWQFSYREMRQQVVALAQLLRQRGVKPGDSVAVALPRSVFLTLALHGIVEAGAAWLPLDTGYPDDRLRMMLEDARPSLLIATEDQLARFSDIPGLESLCYQQPLAAGDDAPLALSKPDHTAYIIFTSGSTGRPKGVMVGQTAIVNRLLWMQDRYPLSADDVVAQKTPCSFDVSVWEFWWPFIAGAQLVMAEPEAHRDPQAMQQFFARYGVTTTHFVPSMLAAFVASLDADSVAACRTLRRVFCSGEALPTELCREWERLTGAPLHNLYGPTEAAVDVSWYPACGPELAAVTGSSVPIGWPVWNTGLRILDAAMRPVPPGVAGDLYLTGIQLAQGYLGRPDLTASRFIADPFAPGERMYRTGDVARWLANGAVEYLGRSDDQLKIRGQRIELGEIDRVMSALPDVGQAVSHACVFNQAAATGGDARQLVGYLVSDSGLPLDTAALKARLAEQLPPHMVPVVLMQLAELPLSANGKLDRKALPLPTLGGERSGRPPEPGMETLVAAAFSQLLGCEVNDIDADFFALGGHSLLAMRLAAQLSRQLARQVTPGQVMVASTVGKLSALLAADLSDEQAQRLGLDTLLPLRESDGPTLFCFHPASGFAWQFSVLARYLSPRWSITGIQSPRPQGPMASAASLDEVCEHHLRTLLAQQPHGPYYLFGYSLGGTLAQGIAARLRQRGEAVAFLGLLDTWPPETQNWAEKEANGLDPEVLAEIDREREAFLAAQQGQASGELFSAIEGNYADAVRLLTSAHSAKFDGKATLFVAEKTRQEGMDPQVVWGPWVGELEVFSQNCAHVDIISPQAFEAIGPVVREILG

SEQ ID NO: 93078 - protein, 209 aa, Klebsiella pneumoniae
  REGION 1..209: note = tr|A0A5F0CXG9|A0A5F0CXG9_KLEPN Enterobactin synthase subunit EntD OS=Klebsiella pneumoniae subsp. pneumoniae; OX = 72407 GN=entD PE=3 SV=1
MRHHRTALPLAGYTIQQIDFDPATFQPEDLFWLPYHASLTGWGRKRQAEHLAGRIAAAYALREVGEKRLPAIGDRRQPLWPTPWFGSISHCGQRALAVIADRPVGVDIERRFTPQLAAELESSIISPAEKTALLRSGLPYPLALTLAFSAKESGFKATPAANQRALGFADFQIVEITASTLALMFAEQRYLLHWIASEEQVITLCALQQ

SEQ ID NO: 93079 - protein, 1293 aa, unidentified
  source 1..1293: note = Klebsiella quasipneumoniae
  REGION 1..1293: note = tr|A0A483KJ59|A0A483KJ59_9ENTR Enterobactin non-ribosomal peptide synthetase EntF OS=Klebsiella quasipneumoniae OX=1463165 GN=entF PE=4 SV=1
MTTRLPLVAAQPGIWMAERLSTLPGAWSVAHYVELRGALDPALLGKAIVAGLQQADTLSLRFEEEEGEVWQWLAAERTFGEPPIVDLRTAPDPHRAATERMQADLAQDLRVDGGNPLVCHQLLRVGDDHWYWYQRYHHLLVDGFSFPAITRQIAAIYRAWQRGEATPESPFTPFAEVVDEYQRYAGSEAWQRDKAFWQAQRQALPAPASLSAAPLGGRAAGGDIWRMKLAMNADAFRRLAGHAPQCQPADLALALTTLWLGRLCNRMDYAAGFIFMRRMGSAALTSTGPVLNVLPLAVHIDAQETLADLAMRLAAQLKKMRRHQRYDAEQIVRDSGKAAGDEPLFGPVLNVKVFDYQVDIDGVEAVTHTLATGPVNDLELALFPDETGGLSLELLANKARYDEAELRRHMARLTALLAQFAADPTLRCGEAEMLSADEQARLAAVNDTAMPLPATTLSALVADQARKTPDAPALADANWQFSYREMRQQVVALAQLLRQRGVKPGDSVAVALPRSVFLTLALHGIVEAGAAWLPLDTGYPDDRLRMMLEDARPSLLIATEDQLARFSDIPGLESLCYQQPLAVADDAPLALSKPEHTAYIIFTSGSTGRPKGVMVGQTAIVNRLLWMQDRYPLSADDVVAQKTPCSFDVSVWEFWWPFIAGAQLVMAEPEAHRDPQAMQQFFAHYGVTTTHFVPSMLAAFVASLDADSVAACRTLRRVFCSGEALPTELCREWERLTGAPLHNLYGPTEAAVDVSWYPACGPELAAVTGSSVPIGWPVWNTGLRILDAAMRPVPPGVAGDLYLTGIQLAQGYLGRPDLTASRFIADPFAPGERMYRTGDVARWLANGAVEYLGRSDDQLKIRGQRIELGEIDRVMSALPDVAQAVSHACVFNQAAATGGDARQLVGYLVSDSGLPLDTAALKARLAEQLPPHMVPVVLMQLPDLPLSANGKLDRKALPLPTLGGERSGRPPEPGMETVVAAAFSQLLGCEVNDIDADFFALGGHSLLAMRLAAQLSRQLARQVTPGQVMVASTVGKLSALLAADLSDEQAQRLGLDALLPLRESDGPTLFCFHPASGFAWQFSVLARYLSPRWSITGIQSPRPQGPMAGAASLDEVCEHHLQTLLAQQPHGPYYLFGYSLGGTLAQGIAARLRQRGEAVAFLGLLDTWPPETQNWAEKEANGLDPAVLAEIAREREAFLAAQQGQASGELFSAIEGNYADAVRLLTTAHSAKFDGKATLFVAEKTRQAGMDPQVVWGPWVGELEVFSQNCAHVDIISPQAFEAIGPVVREILG

SEQ ID NO: 93080 - protein, 1293 aa, unidentified
  source 1..1293: note = Klebsiella quasipneumoniae
  REGION 1..1293: note = tr|A0A501APY7|A0A501APY7_9ENTR Enterobactin non-ribosomal peptide synthetase EntF OS=Klebsiella quasipneumoniae subsp. quasipneumoniae OX=1667327 GN=entF; PE = 4 SV=1
MTTRLPLVAAQPGIWMAERLSTLPGAWSVAHYVELRGALDPALLGKAIVAGLQQADTLSLRFEEEEGEVWQWLAAERTFGEPPIVDLRTAPDPHRAATERMQADLAQDLRVDGGNPLVCHQLLRVGDDHWYWYQRYHHLLVDGFSFPAITRQIAAIYRAWQRGEATPESPFTPFAEVVDEYQRYAGSEAWQRDKAFWQAQRQALPAPASLSAAPLGGRAAGSDIWRMKLAMNADAFRRLAGHAPQCQPADLALALTTLWLGRLCNRMDYAAGFIFMRRMGSAALTSTGPVLNVLPLAVHIDAQETLADLAMRLAAQLKKMRRHQRYDAEQIVRDSGKAAGDEPLFGPVLNVKVFDYQVDIDGVEAVTHTLATGPVNDLELALFPDETGGLSLEILANKARYDEAELRRHMARLTALLAQFAADPTLRCGEAEMLSADEQARLAAVNDTAMPLPATTLSALVADQARKTPDAPALADANWQFSYREMRQQVVALAQLLRQRGVKPGDSVAVALPRSVFLTLALHGIVEAGAAWLPLDTGYPDDRLRMMLEDARPSLLIATEEQLARFSDIPGLESLCYQQPLAVADDAPLALSKPEHTAYIIFTSGSTGRPKGVMVGQTAIVNRLLWMQDRYPLSADDVVAQKTPCSFDVSVWEFWWPFIAGAQLVMAEPEAHRDPQAMQQFFAHYGVTTTHFVPSMLAAFVASLDADSVAACRTLRRVFCSGEALPTELCREWERLTGAPLHNLYGPTEAAVDVSWYPACGPELAAVTGSSVPIGWPVWNTGLRILDAAMRPVPPGVAGDLYLTGIQLAQGYLGRPDLTASRFIADPFAPGERMYRTGDVARWLANGAVEYLGRSDDQLKIRGQRIELGEIDRVMSALPDVAQAVSHACVFNQAAATGGDARQLVGYLVSDSGLPLDTAALKARLAEQLPPHMVPVVLMQLPDLPLSANGKLDRKALPLPTLGGERSGRPPEPGMETVVAAAFSQLLGCEVNDIDADFFALGGHSLLAMRLAAQLSRQLARQVTPGQVMVASTVGKLSALLAADLSDEQAQRLGLDALLPLRESDGPTLFCFHPASGFAWQFSVLARYLSPRWSITGIQSPRPQGPMAGAASLDEVCEHHLQTLLAQQPHGPYYLFGYSLGGTLAQGIAARLRQRGEAVAFLGLLDTWPPETQNWAEKEANGLDPAVLAEIAREREAFLAAQQGQASGELFSAIEGNYADAVRLLTTAHSAKFDGKATLFVAEKTRQAGMDPQVVWGPWVGELEVFSQNCAHVDIISPQAFEAIGPVVREILG

SEQ ID NO: 93081 - protein, 209 aa, unidentified
  source 1..209: note = Klebsiella quasipneumoniae
  REGION 1..209: note = tr|A0A5C6IMX8|A0A5C6IMX8_9ENTR Enterobactin synthase subunit EntD OS=Klebsiella quasipneumoniae subsp. similipneumoniae OX=1463164 GN=entD PE=3 SV=1
MRIHHATLPLAGYTLQQIDFDPATFQPEDLLWLPYHASLSGWGRKRQAEHLAGRIAAVYALREVGEKQPPAIGDRRQPLWPAPWFGSISHCGQRALAVVTDRPVGVDIERRFTPPLAAELESSIINEVEKKVLLHSGLPFPLALTLAFSAKESGFKATPTASQRALGFDDFQIVEVTASTVALRFAGQCYPLHWTASEEQVITLCALQQ

SEQ ID NO: 93082 - protein, 1293 aa, unidentified
  source 1..1293: note = Klebsiella quasivariicola
  REGION 1..1293: note = tr|A0A556VH91|A0A556VH91_9ENTR Enterobactin non-ribosomal peptide synthetase EntF OS=Klebsiella quasivariicola OX=2026240 GN=entF PE=4 SV=1
MTTRLPLVAAQPGIWMAERLSTLPGAWSVAHYVELRGALDPTLLGKAIVAGLQQADTLSLRFEEEEGEVWQWLAADRTFGEPSIIDLRTAPDPHHAAVERMQADLAQDLRVDGGNPLVCHQLLRVGDDRWYWYQRYHHLLVDGFSFPAITRQIAAIYRAWQRGEATPESPFTPFAEVVDEYQRYAGSEAWQRDKAFWQAQRQALPAPASLSAAPLGGRAAGSDIWRMKLEMNADAFRRLAGHAPQCQPADLALALTTLWLGRLCNRMDYAAGFIFMRRMGSAALTSTGPVLNVLPLAVHIDARETLADLAMRLAAQLKKMRRHQRYDAEQIVRDSGKAAGDEPLFGPVLNVKVFDYQLDIDGIEAVTHTLATGPVNDLELALFPDETGGLSLEILANKARYDEAELRRHMARLTALLAQFAADPALRCGEAEMLSADELARLAAVNDTAVPLPATTLSALVADQARKTPDAPALADARWQFSYREMRQQVVALAQLLRQRGVKPGDSVAVALPRSVFLTLALHGIVEAGAAWLPLDTGYPDDRLRMMLEDARPSLLIASEDQLARFSDIPGLESLCYQQPLAAGDEAPLALSKPDHTAYIIFTSGSTGRPKGVMVGQTAIVNRLLWMQDRYPLSADDVVAQKTPCSFDVSVWEFWWPFIAGAQLVMAEPEAHRDPQAMQQFFARYGVTTTHFVPSMLAAFVASLDGDSVAACRTLRRVFCSGEALPTELCRDWERLTGAPLHNLYGPTEAAVDVSWYPACGPELAAVTGSSVPIGWPVWNTGLRILDAAMRPVPPGVAGDLYLTGIQLAQGYLGRPDLTASRFIADPFAPGERMYRTGDVARWLTNGAVEYLGRSDDQLKIRGQRIELGEIDRVMSALPDVAQALSHACVFNQAAATGGDARQLVGYLVSDSGLPLDTAALRARLAEQLPPHMVPVVLMQLAELPLSANGKLDRKALPLPTLGGERSGRPPEPGMETLVAAAFSQLLGCEVNDIDADFFALGGHSLLAMRLAAQLSRQLARQVTPGQVMVASTVGKLSALLAADLSDEQARRLGLDTLLPLRESDGPTLFCFHPASGFAWQFSVLARYLSPRWSITGIQSPRPQGPMASAASLDEVCEHHLRTLLAQQPHGPYYLFGYSLGGTLAQGIAARLRQRGEAVAFLGLLDTWPPETQNWAEKEANGLDPEVLAEIDREREAFLAAQQGQASGELFSAIEGNYADAVRLLTTAHSASFDGKATLFVAEKTRQAGMDPQVVWGPWVGELEVFSQNCAHVDIISPQAFEAIGPVVREILG

SEQ ID NO: 93083 - protein, 1285 aa, Klebsiella sp.
  REGION 1..1285: note = tr|A0A4S5DJR4|A0A4S5DJR4_9ENTR Enterobactin non-ribosomal peptide synthetase EntF OS=Klebsiella sp. Z2; OX = 2561928 GN=entF PE=4 SV=1
MNRLPLVAAQPGIWMAEQLSSLPNAWSVAHYTELKGAIDAPLLAKAIAEGMMQADTLRMRFAEDHGEVWQWIDEAMLLPEPSIVRVDSHDAAVALMEADLNQNLRVDSGQPLAFHQLIQVGESHWYWYQRYHHLVVDGFSFPAITRQIAAIYAAWQKGEPAPASPFTPFAEVVEEYQRYRDSEAYQRDGAFWAEQRQQLPSPVSLSSAPLPGHAATTDILRLKMAMDGRAFSQLAQMAGQAQRTDLALALVVLWLGRLTGRLDYAAGFIFMRRMGSAALTATGPVLNVLPLAVNIRPHESLPELALRLANQLKKMRRHQRYDAEQIVRDSGRAAGDEALFGPVLNVKVFDYQLDIDGVEAITHTLATGPVNDLELALFPDEQGGLSIEILANGQRYDEATLKGHAARLNAMLTQFAANPDLRCGDVDTVSEQEYARLARINDTGLALPSTTLADLVAEQASKTPDAPALADAHTELNYRQMREQVVALANLLRARGVKPGDSVAVALPRSVFLTLALHGIVEAGAAWLPLDTGYPDDRLRMMLEDAKPSLLITTDEQLPRFSDLSVETFSYNTLLPTSGAEPLRLAKPEQTAYIIFTSGSTGRPKGVMVGHTAIVNRLKWMQDHYPLTAHDVVAQKTPCSFDVSVWEFWWPFIAGAKLVMAEPDAHRDPQAMQSFFAEYGVTTTHFVPSMLAAFVASLTPENAHCCRTLKQVFCSGEALPTALCREWEQLTHAPLHNLYGPTEAAVDVSWYPAYGPELAAVEGNSVPIGFPVWNTGLRILDAMMRPVPFGVAGDLYLTGIQLAQGYLGRPDLTASRFIADPFAPGERMYRTGDVARWLDNGAVEYLGRSDDQLKIRGQRIELGEIDRAMLALPDVAQAVAHACVFNQAAATGGDARQLVGYVVSESGLPLDRDALLASLKAQLPPHMVPVVLLQISALPLSANGKLDRKALPLPDLTSKTSGRAPETQTEVAVAQAFSSLLGCAVNDIEADFFALGGHSLLAMRLAAQLSRAFSRKVTPGQIMVASTVSKLSALLDSQMSDEQAQRLGYETLLPLRESNGPTLFCFHPASGFAWQFSVLARYLSPRWSIVGIQSPRPNGPMQQCADLDGVIEHHLNTLRKQQPQGPYYLFGYSLGGTLAQGIAARLREQGEAVAFLGLLDTWPPETQNWAEKEANGLDPAVLAEIERERQAFIAAQQGQGSSELFNAIEGNYADAVRLLTTAHSARFDGKATLFVAERTRTQDPQAAWAPWVGELEVYSQDCAHVDIISPQAFEKIGPVLKEILG

SEQ ID NO: 93084 - protein, 1293 aa, Klebsiella variicola
  REGION 1..1293: note = tr|A0A4V3X0X3|A0A4V3X0X3_KLEVA Enterobactin non-ribosomal peptide synthetase EntF OS=Klebsiella variicola OX=244366 GN=entF PE=4 SV=1
MTTRLPLVAAQPGIWMAERLSTLPGAWSVAHYVELRGALDPALLGKAIVAGLQQADTLSLHFEEEEGEVWQWVAADRTFGEPSIIDLRTAPDPHRAATERMQADLAQDLRVDGGNPLVCHQLLRVGDDRWYWYQRYHHLLVDGFSFPAITRQIAAIYRAWQRGEATPESPFTPFAEVVDEYQRYAGSEAWQRDKAFWQAQRQALPAPASLSAAPLGGRAAGSDIWRMKLEMNADAFRRLAGYAPQCQPADLALALTTLWLGRLCNRMDYAAGFIFMRRMGSAALTSTGPVLNVLPLAVHIDAQETLADLAMRLAAQLKKMRRHQRYDAEQIVRDSGKAAGDEPLFGPVLNVKVFDYQLDIDGVQALTHTLATGPVNDLELALFPDETGGLSLEILANKARYDEAELRRHVARLTALLAQFAADPALRCGEAEMLSADELARLAAVNDTAVPLPATTLSALVADQARKTPDAPALADAHWQFSYREMRQQVVALAQLLRQRGVKPGDSVAVALPRSVFLTLALHGIVEAGAAWLPLDTGYPDDRLRMMLEDARPSLLITSEDQLARFSDIPGLESLCYQQPLAAGDDAPLALSKPDHTAYIIFTSGSTGRPKGVMVGQTAIVNRLLWMQDRYPLSADDVVAQKTPCSFDVSVWEFWWPFIAGAQLVMAEPEAHRDPQAMQQFFARYGVTTTHFVPSMLAAFVASLDADSVAACRTLRRVFCSGEALPTELCREWERLTGAPLHNLYGPTEAAVDVSWYPACGPELAAVTGSSVPIGWPVWNTGLRILDAAMRPVPPGVAGDLYLTGIQLAQGYLGRPDLTASRFIADPFAPGERMYRTGDVARWLTNGAVEYLGRSDDQLKIRGQRIELGEIDRVMSALPDVAQAVSHACVFNQAAATGGDARQLVGYLVSDSGLPLDTAALKARLAEQLPPHMVPVVLMQLADLPLSANGKLDRKALPLPTLGGERSGRPPEPGMETLVATAFSQLLGCEVNDIDADFFALGGHSLLAMRLAAQLSRQLARQVTPGQVMVASTVGKLSALLAADLSDEQARRLGLDTLLPLRESDGPTLFCFHPASGFAWQFSVLARYLSPRWSITGIQSPRPQGPMASAASLDEVCEHHLRTLLAQQSHGPYYLFGYSLGGTLAQGIAARLRQRGEAVAFLGLLDTWPPETQNWAEKEANGLDPEVLAEIDREREAFLAAQQGQASGELFSAIEGNYADAVRLLTTAHSAKFDGKATLFVAEKTRQAGMDPQVVWGPWVAELEVFSQNCAHVDIISPQAFEAIGPVVREILG

SEQ ID NO: 93085 - protein, 1295 aa, unidentified
  source 1..1295: note = Kosakonia cowanii
  REGION 1..1295: note = tr|A0A410KG74|A0A410KG74_9ENTR Enterobactin non-ribosomal peptide synthetase EntF OS=Kosakonia cowanii; OX = 208223 GN=entF PE=4 SV=1
MSERLPLVAAQPGIWMAEKLSSLPNAWSVAHYVELEGDIDAVQLSEAIVTGLMQADTLRMRFTEDNGEVWQSVDETLTFAAPEIADLRQQGDAHSAALALMQADLAQNLRVESGKPLVHHQLMRVGERRWYWYQRYHHLLVDGFSFPAITRQIAAIYTAWRRGEPTPASPFTPFAEVVEEYQRYQGSDAFTRDAAFWAEQRRALPPPVSLSSEPLPGRAATTDILRLNVALESAAFRRLSQAMANTTPADLALALVALWLGRLCGRTDYAAGFIFMRRMGSAALTATGPVLNVLPMGIHLDGMQTLPELASDLARTLKVMRRHQRYDAEQIVRDAGRAAGSEPLFGPVLNVKLFDYQLRLDGIQGITHTLATGPVNDLEIAIFPDEAGGLSLEVLANRSRYDEATLNTHVARLAQLLQQFADNPALRCGDAELLTAKEAEQLSQINATAVSLPATTLSELVALQAVKTPDAPALSDARWRFSYREMREQVVALANQLRALGVQPGDSVAVALPRSVFLTLALHGIVEAGAAWLPLDTGYPDDRLRMMLEDARPRLLITTDDQYARFADIPGLAHFCYDAPLESNGAETLNLARPEQTAYIIFTSGSTGRPKGVMVGHTAIVNRLLWMQAAYPLSANDVVAQKTPCSFDVSVWEFWWPFIAGASLVMAEPEAHRDPQALQAFFAEAGVTTTHFVPSMLAAFVASLTPESAQQSCRTLKQVFCSGEALPADLCREWEALTGVALHNLYGPTEAAVDVSFYPAYGETLAQVRGNSVPIGYPVWNTGLRILDAMMRPVPFGVAGDLYLTGIQLAQGYLGRPDLTASRFIADPFAPGERMYRTGDVARWLEGGAVEYLGRSDDQLKIRGQRIELGEIDRAMLALPDIAQAVAHACVFNQAAASGGDARQLVGYLVSSSAQQLDTAALLEQLRAQLPAHMVPVLLMQLSALPLSANGKLDRKALPLPALQAEQGGRPLNAGMETQVAQAFAALLGCEVNDAQADFFALGGHSLLAMRLAAQLSRQCDRQVTPGQIMVAPTVEKLAALLEQPLSNEQAGRLGLEAVLPLRESAGPTLFCFHPASGFAWQFSVLARYLAPRWSITGIQSPRPDGPLQQAATLDEACDQQLATLLAQQPHGPYYLFGYSLGGTLAHSIAARLRQRGEEVAFLGLLDTWPPETQNWAEKEANGLDPAVLAEIERERQAFLAAQQGQASTELFSQIEGNYVDAVRLLTTAHSVPFDGKATLFVAERTLPPGTDPQRAWAPWVRELAVYRQDCAHVDIISPQAFGQIGPVLRELLER

SEQ ID NO: 93086 - protein, 1295 aa, unidentified
  source 1..1295: note = Kosakonia radicincitans
  REGION 1..1295: note = tr|A0A5C1PD70|A0A5C1PD70_9ENTR Enterobactin non-ribosomal peptide synthetase EntF OS=Kosakonia radicincitans OX=283686 GN=entF PE=4 SV=1
MTQRLPLVAAQPGIWMAEKLSSLPNAWSVAHYVELKGDIDAALLAQAIVTGMAQADTLRMRFEEDNGDVWQWVDESQQFAQPAITDLRSHSDAHTAALNIMRADLAQNLRVESGKPLVCHQLLRVGEQCWYWYQRYHHLLVDGFSFPAITRQIAAIYSAWRRGDETPSSPFTPFAEVVEEYQRYRDSDGWQRDAAFWAKQRSELPPPVSLSPTPLPGRAATTDILRLNVALNADDFRCLTRALPNSQPADLGLALVALWLGRLCGRMDYAAGFIFMRRMGSAALTATGPVLNVLPLGIHIDGAQTLAELAAQLEGSLKVMRRHQRYDAEQIVRDAGRAAGDEPLFGPVFNVKMFDYLLDVDGIHGITHTLATGPVNDLEIALFPDEEGGLAVEVLANRSRYDEATLRGHVARLGQLLAQFAENPALRSGDADLLAPHEAQQLAKINDTGMMLPTTTLSDLVAMQAAKTPDAPALRDARWQFSYREMREQVVALAQHLRQLGVQPGDSVAVALPRSVFLTLALHGIVEAGAAWLPLDTGYPDERLRMMLEDAQPRLLITAEDQLSRFSDIPGLAHFCYQQPLAAQGSEALNLARPEQTAYIIFTSGSTGRPKGVMVGQTAIVNRLLWMQEQYPLTAQDVVAQKTPCSFDVSVWEFWWPFIAGASLVMAEPEAHRDPQALQAFFAEYGVTTTHFVPSMLAAFVASLTPESAQQRCRTLKQVFCSGEALPAELCREWQHLTGAPLHNLYGPTEAAVDVSWYPAHGEALAQVRGNSVPIGFPVWNTGLRILDGMMRPVPPGVAGDLYLTGIQLAQGYLGRPDLTASRFIADPFAPGERMYRTGDVARWLENGAVEYLGRSDDQLKIRGQRIELGEIDRAMLALADVAQAVAHACVFNQAAASGGDARQLVGYVVSASGLPLDTAALLDQLREQLPPHMVPVRLLQLSALPLSANGKLDRKALPLPELAAARCGRPVNTGMETRVAQAFAALLGCEVQDAQADFFALGGHSLLAMRLAAQLSREHQRPVTPGQIMVASTVEKLAALLEQSLTAEQAQRLGMETLLPLRESDGPTLFCFHPASGFAWQFSVLARYLAPRWSITGIQSPRPFGPLQQAATLDEACEQHLATLLAQQPHGPYHLFGYSLGGTLAQGIAARLRARGEEVAFLGLLDTWPPETQNWAEKEANGLDPQVLAEIERERQAFLAAQQGQGSGELFSTIEGNYADAVRLLSTAHSLPFDGKATLFVAERTLPAGTDPHKAWAPWVRELAVYRQDCAHVDIISPQAFERIGPVLREILGE

SEQ ID NO: 93087 - protein, 1295 aa, unidentified
  source 1..1295: note = Kosakonia sp.
  REGION 1..1295: note = tr|A0A4R0HSX7|A0A4R0HSX7_9ENTR Enterobactin non-ribosomal peptide synthetase EntF OS=Kosakonia sp. WCHEs120001 OX=2529380 GN=entF PE=4 SV=1
MTQRLPLVAAQPGIWMAEKLSTLPNAWSVAHYVELKGDIDAALLAQAIVSGLSQADTLRMRFEEENGEVWQWVDEAHVFALSEVVDLRDNRSPRAAALQAMQADLAQNLRVESGKPLVCHLLLRVGEQHWYWYQRYHHLLVDGFSFPAITRQIAAIYSAWRRSEATPASPFTPFAEVVEEYQRYRESDAWPRDRAFWAQQRSALPSPVSLSDTPLPGRAATTDILRLNAAMDTDAFRRVTQAFSHHAPADLALALAALWLGRLCGRTEYAAGFIFMRRMGSAALTASGPVLNVLPLGIHLDGTQTLSGLATTLAGSLKAMRRHQRYDAEQIVRDAGCAAGDEPLFGPVFNVKMFDYLLDVDGIKGTTHTLTTGPVNDLEIALFPHEEGGLSLEVLANRSRYDQSTLTTHVERLAHLLKQFAENPQLRCGDAELLLSPEAQRLAEINDTGMMLPTTTLSALVAAQAEKTPDAPALADVQWQFSYREMREQVVALAQQLRQLGVQPGDSVAVALPRSVFLTLALHGIVEAGAAWLPLDTGYPDERLKMMLEDAKPRLIITAQNQLARFSDMPGLRHFCYEAPLETHGSEALNLARPEHTAYIIFTSGSTGRPKGVMVGQTAIVNRLLWMQESYPLTAQDVVAQKTPCSFDVSVWEFWWPFIAGARLVMAEPDAHRDPHALQEFFTHYGVTTTHFVPSMLAAFVASLTPESAQRSCHTLKQVFCSGEALPANLCREWQQLTGAPLHNLYGPTEAAVDVSWYPAYGEALAGVRGNSVPIGFPVWNTGLRILDAMMRPVPPGVAGDLYLTGIQLAQGYFGRPDLTASRFIADPFAAGERMYRTGDVARWLENGAVEYLGRSDDQLKIRGQRIELGEIDRAMLALPDVAQAVAHACVLNQAAASGGDARQLVGYVVSASGQTLDAATLLAQLREQLPPHMVPVLLVQLDVLPLSANGKLDRKALPLPELAVQQGGRPLNAGLETIVAQAFAGLLGCEVNDAQADFFALGGHSLLAMRLAAQLSRECERQVTPGQIMVASTVEKLASMLEQTLSAEQAGRLGLETLLPLRASDGPTLFCFHPASGFAWQFSVLARYLAPRWSITGIQSPRPDGPLQQAATLDEACEQHLATLLAQQPHGPYYLLGYSLGGTLAQGIAARLRQRGEAVAFLGLLDTWPPETQNWAEKEANGLDPAVLAEIERERQAFLAAQQGQASGELFSVIEGNYADAVRLLTTAHSLPFDGKATLFVAGRTLPAGTDPHTAWAPWVRELEFYRQDCAHVEIISPQAFERIGPVLREVLGE

SEQ ID NO: 93088 - protein, 214 aa, Leclercia adecarboxylata
  REGION 1..214: note = tr|A0A5B7XQW2|A0A5B7XQW2_9ENTR Enterobactin synthase subunit EntD OS=Leclercia adecarboxylata OX=83655 GN=entD; PE = 3 SV=1
MHTHHSTFLLAGQTLHRITFDPATFTDADLLWLPHHHQLADAGRKRKADHLAGRIAAFHALNRQAIPAIGSSGEPLWPVGVSGSLSHSGTLAVAICREGGLIGVDCEAIIDESEAREIQDGVIDVQEARVLAGCGLPFSLAFTLAFSAKESLFKALFPQVQAWMGFESARVTALTNDTLTLILTRPLPPFAQNQAFTAHWLRSDATVVTLICDE

SEQ ID NO: 93089 - protein, 224 aa, unidentified
  source 1..224: note = Lelliottia nimipressuralis
  REGION 1..224: note = tr|A0A4Y8IYU1|A0A4Y8IYU1_9ENTR Enterobactin synthase subunit EntD OS=Lelliottia nimipressuralis OX=69220; GN = entD PE=3 SV=1
MHTTHRTFALANLAVHRITFDPTTFTDADLLWLPHHAQLADAGRKRKTEHLAGRIAAAHALPDHPIPGIGTSGEPLWPDGISGSITHSGTQAMAVVVRERQALIGIDCEAILPENEAREIKDGVIDVQEEPVLSRSGYPFALALTLVFSAKESLFKALFPRVQAYMGFDSARVTELDDKTLTLALTRQLAGFNEGAAFTLHWQQQGEQAITLLSRSPADGPSRW

SEQ ID NO: 93090 - protein, 264 aa, unidentified
  source 1..264: note = Mycobacterium talmoniae
  REGION 1..264: note = tr|A0A2S8BG73|A0A2S8BG73_9MYCO Enterobactin synthase component E OS=Mycobacterium talmoniae OX=1858794 GN=entE; PE = 4 SV=1
MSTGGPSAADSPAFTAEDAARYHAAGWWSDTTLSAVVHRHAQRTPERVAYLDYPGAALTWREFDDAANTLAAQRAGAGVTRGDRVAVWHGDSAAIHVLFVAIERCGAVVVGIGARAGTREVTAILRSARPTILITDPPRQAPAAQAEADVPVLVLRHNPAGPTLNVQPAALPADAGFGPDEVFLINSTSGTTGLPKCVVHTQNRWYYFHQKAVAHGRLTDDDIFLPVIPTPFGFGLWTSHATPIHLAPPRCCWTGSAPRRPAKP

SEQ ID NO: 93091 - protein, 217 aa, unidentified
  source 1..217: note = Pseudocitrobacter sp.
  REGION 1..217: note = tr|A0A5B0K3I2|A0A5B0K3I2_9ENTR Enterobactin synthase subunit EntD OS=Pseudocitrobacter sp. 73 OX=2605731; GN = entD PE=3 SV=1
MQTNHSTFTLARHLLHRIDFQPETFSDGDLLWLPHHADLVHFGKKRRIEHLAGRIAAAYALQPLGVKAIPGIGEQRQPLWPEGIFGSISHSGKRAIAAVSQTPVGIDIEHIFSSQLAAEVATQIASPAEIFRLQTSGLPFAVALTLAFSAKESVYKAFSSQAEPCPGFAAAEMTAIDENALCLRLTPAFSTQLAGKEISVAYEVEGDEVVTCTVMPL

SEQ ID NO: 93092 - protein, 611 aa, Pseudomonas fluorescens
  REGION 1..611: note = tr|A0A5E7JKS8|A0A5E7JKS8_PSEFL Enterobactin synthase component E OS=Pseudomonas fluorescens OX=294 GN=entE PE=4; SV = 1
MTIEFNHWPLESAQRYRDKGYWLDKPLTHLLQERSQSQPDAPAIICGDRHFSYAELDQLSSNLASRLAASGLGNGDTALVQLPNIAEFYIVLFALLKSGIAPLNALYSHRKLELKSYAKQIAPTLLIASREHEVFRDDSYIADFKEVGSSPDIILLLGEQRHENNLADWINTPSESNVNVSPSGPGEVALFQLSGGSTGTPKLIPRTHNDYYYNARASAQVCELTPRTRFLCALPAAHNFLLSSPGALGVLHAGGCIILAPSPEPLTCFSIIQRQEVNTVALVPSAVALWLQAAPEHKEQLQSLEFLQVGGACFADSLARQVPGVLGCKLQQVFGMAEGLINYTRLNDSDEQIFTTQGRPISPDDEIKIVDEQGLPVPDGEPGMLATRGPYTFCGYYQSPEQNAQAFDNEGYYYSGDLVQRMPSGDLRVVGRVKDQINRGGEKVASEEIENLIVLHPDVTHAGLVAMPDDRLGEKSCAFVVSRNPSLKPPALRRHLMELGIAEYKLPDRIRLIETMPLTPVGKIDKKHLRQLLAAETTRAWLQTRVRQLVEDCEDLDPEENLIFYGLDSLQVMRLAAELKERGIAVSFEELADSPTLSSWWSLVDARQIAA

SEQ ID NO: 93093 - protein, 210 aa, Raoultella planticola
  REGION 1..210: note = tr|A0A4U0PDT7|A0A4U0PDT7_RAOPL Enterobactin synthase subunit EntD OS=Raoultella planticola OX=575 GN=entD PE=3; SV = 1
MQTTHSTFLFAGHRLHQIDFDPATFAPHDILWLPHHQQLENCGRKRQMEHLAGRIAAACALKAVGVKGVPGTGDQRQPLWPVPWSGSISHCDTRALAVVAARPVGIDIENVLTPALATELESSIISPTERAVLKASGLPFELALTLAFSAKESGFKALPITQQSGTGFMHFRITDIQGEVVTLWTEQQMYQVHWMAVEPCVITLCQTQYR

SEQ ID NO: 93094 - protein, 1294 aa, unidentified
  source 1..1294: note = Salmonella abony
  REGION 1..1294: note = tr|A0A5I5TXL3|A0A5I5TXL3_SALAB Enterobactin non-ribosomal peptide synthetase EntF OS=Salmonella abony; OX = 29482 GN=entF PE=4 SV=1
MTQRLPLVAAQPGIWMAEKLSDLPSAWSVAHYVELNGELDVALLAKAVAVGMQQADTLRMRFTEENGEVWQWIDPEHTFGEPPIADLRDHPDPHHAALALMQADLRQNLRADSGKPLAFHQLIRIDDTRWYWYQRYHHLLVDGFSFPAITRQIAAIYRAWQSDAPTPESPFTPFADVVEEYQRYRQSEAWQRDGAFWAQQRRELPPPASISAAPLPGRSASADILRMKLSAPAGAFRQLAAHMPEIPRADLALALVTLWLGRLCGRMDYAAGFIFMRRMGSAALTATGPVLNVLPLAVNLYATEDLPTLAKRLAVQLKKMRRHQRYDAEQIVRDSGRAAGETPLFGPVLNIKVFDYHLDLPGIQAQTHTLATGPVNDLELALFPDENGGLDIELLANAQRYDGATLSRHALRLMALITQFADNPALCCGDAQMLLAEEQTQLTHLNNTAVTIPAATLSDLVAQQAQKTPEASALADAHYHFTYREMREQVVALAYALRERGVQPGDSVAVALPRSVFLTLALHGIVEAGAAWLPLDTGYPDDRLRMMLEDAQPKLLITTQAQLARFHDIPGMEYLCYSQPLPVSDATPLGLSLPHHTAYIIFTSGSTGRPKGVMVGQTAIVNRLLWMQDHYPLTADDVVAQKTPCSFDVSVWEFFWPFIAGAKLVMAEPEAHRDPLAMQRFFAQYGVTTTHFVPSMLAAFIASLTPASAGKSCASLKRVFCSGEALPTALCREWETLTNAPLHNLYGPTEAAVDVSWYPACGDELAAVDGNSIPIGYPVWNTGLRILDAHMQPVPPGVAGDLYLTGIQLAQGYLGRPDLTASRFIADPFAPGERMYRTGDVARWLDSGAVEYLGRSDDQLKIRGQRIELGEIDRVMQTLPDVEQAVAHACVFNQAAATGGDARQLVGYLVSHSGLPLDLPALQEKLRQKLPAHMVPVVLLQLAGLPLSANGKLDRKALPLPDLTPRVKGRAPQSATEIAVAAAFSRLLGCEINDVESDFFALGGHSLLAMKLAAQLSQTFNRQVTPGQVMVASDVAQLSKLLDTDDDERSRNLGFGPLLPLRESDGPTLFCFHPASGFAWQFSVLSRYLSPSWSIMGIQSPRPAGPMQTATTLDEVCEHHLATLLARQPHGPYYLLGYSLGGTLAQGIAARLCARGETVAFLGLLDTWPPETQNWREKEANGLNSDVLAEIERERAAFVAAQQGNASEALFTAIEGNYADAVRLLTTAHSVPFDGHATLFVADKTVPEGVSPEQSWSPWIASLAIYRQPCAHVDIISPSAFETIGPIISELINK

SEQ ID NO: 93095 - protein, 1294 aa, unidentified
  source 1..1294: note = Salmonella anatum
  REGION 1..1294: note = tr|A0A2T8MN70|A0A2T8MN70_SALAN Enterobactin non-ribosomal peptide synthetase EntF OS=Salmonella anatum; OX = 58712 GN=entF PE=4 SV=1
MTQRLPLVAAQPGIWMAEKLSDLPSAWSVAHYVELNGELDAPLLAKAVAVGMQQADTLRMRFTEENGEVWQWIDPEHTFGEPPIADLRDHPDPHHAALALIQADLRQNLRADSGKPLAFHQLIRIDDTRWYWYQRYHHLLVDGFSFPAITRQIAAIYRAWQSDAPTPESPFTPFADVVEEYQRYRQSEVWQRDGAFWAQQRRELPPPASISAAPLPGRSASADILRMKLSAPAGAFRQLAAHMPEIPRADLALALVTLWLGRLCGRMDYAAGFIFMRRMGSAALTATGPVLNVLPLAVNLHATEDLLTLAKRLAAQLKKMRRHQRYDAEQIVRDSGRAAGETPLFGPVLNIKVFDYYLDLPGIQAQTHTLATGPVNDLELALFPDENGGLDIELLANAQRYDDATLSRHALRLMALITQFADNPALRCGDAQMLLAEEQTQLTHLNNTAVTIPAATLSDLVAQQAQKTPEASALADAHYHFTYREMREQVVALAYALRERGVQPGDSVAVALPRSVFLTLALHGIVEAGAAWLPLDTGYPDDRLRMMLEDAQPKLLITTQAQLARFHDIPGMEYLCYSQPLPVSNATPLGLSLPHHTAYIIFTSGSTGRPKGVMVGQTAIVNRLLWMQDHYPLTADDVVAQKTPCSFDVSVWEFFWPFIAGAKLVMAEPEAHRDPLAMQRFFAQYGVTTTHFVPSMLAAFIASLTPASAGKSCASLTRVFCSGEALPTALCREWETLTNAPLHNLYGPTEAAVDVSWYPACGDELAAVDGNSIPIGYPVWNTGLCILDAHMQPVPPGVAGDLYLTGIQLAQGYLGRPDLTASRFIADPFAPGERMYRTGDVARWLDSGAVEYLGRSDDQLKIRGQRIELGEIDRVMQTLPDVEQAVAHACVFNQAAATGGDARQLVGYLVSHSGLPLDLPALQEKLRQKLPAHMVPVVLLQLAGLPLSANGKLDRKALPLPDLTPRVKGRAPQSATEIAVAAAFSRLLGCEINDVESDFFALGGHSLLAMKLAAQLSQTFNRQVTPGQVMVASDVAQLSKLLDTDDDERSRNLGFGPLLPLRESDGPTLFCFHPASGFAWQFSVLSRYLSPSWSIMGIQSPRPAGPMQTATTLDEVCEHHLATLLARQPHGPYYLLGYSLGGTLAQGIAARLRARGETVAFLGLLDTWPPETQNWREKEANGLNPDVLAEIERERAAFVAAQQGNASDALFTAIEGNYADAVRLLTTAHSVPFDGHATLFVADKTVPEGVSPEQSWSPWIASLAIYRQPCAHVDIISPSAFETIGPIISELINK

SEQ ID NO: 93096 - protein, 1294 aa, unidentified
  source 1..1294: note = Salmonella berta
  REGION 1..1294: note = tr|A0A3U8PJX7|A0A3U8PJX7_SALBE Enterobactin non-ribosomal peptide synthetase EntF OS=Salmonella berta; OX = 28142 GN=entF PE=4 SV=1
MTQRLPLVAAQPGIWMAEKLSDLPSAWSVAHYVELNGELDVALLAKAVAVGMQQADTLRMRFTEENGEVWQWIDPEHTFGEPPIADLRDHPDPHHAALALMQADLRQNLRADSGKPLAFHQLIRIDDTRWYWYQRYHHLLVDGFSFPAITRQIAAIYRAWQSDAPTPESPFTPFADVVEEYQRYRQSEAWQRDGAFWAQQRRELPPPASISAAPLPGRSASVDILRMKLSAPEGAFRQLAAHMPEIPRADLALALVTLWLGRLCGRMDYAAGFIFMRRMGSAALTATGPVLNVLPLAINLHATEDLPTLAKRLAAQLKKMRRHQRYDAEQIVRDSGRAAGETPLFGPVLNIKVFDYYLDLPGIQAQTHTLATGPVNDLELALFPDENGGLDIELLANAQRYDDATLSRHALRLMALITQFADNPALRCGDAQMLLAEEQTQLTHLNNTAVTIPAATLSDLVAQQAQKTPEASALADAHYHFTYREMREQVVALAYALRERGVQPGDSVAVALPRSVFLTLALHGIVEAGAAWLPLDTGYPDDRLRMMLEDAQPKLLITTQAQLARFHDIPGMEYLCYSQPLPVSDATPLGLSLPHHTAYIIFTSGSTGRPKGVMVGQTAIVNRLLWMQDHYPLTADDVVAQKTPCSFDVSVWEFFWPFIAGAKLVMAEPEAHRDPLAMQRFFAQYGVTTTHFVPSMLAAFIASLTPASAGKSCASLKRVFCSGEALPTALCREWETLTNAPLHNLYGPTEAAVDVSWYPACGDELAAVDGNSIPIGYPVWNTGLRILDAHMQPVPPGVAGDLYLTGIQLAQGYLGRPDLTASRFIADPFAPGERMYRTGDVARWLDSGAVEYLGRSDDQLKIRGQRIELGEIDRVMQTLPDVEQAVAHACVFNQAAATGGDARQLVGYLVSHSGLPLDLPALQEKLRQKLPAHMVPVVLLQLAGLPLSANGKLDRKALPLPDLTPRVKGRAPQSATEIAVAAAFSRLLGCEINDVESDFFALGGHSLLAMKLAAQLSQTFNRQVTPGQVMVASDVAQLSKLLDTDDDERSRNLGFGPLLPLRESDGPTLFCFHPASGFAWQFSVLSRYLSPSWSIMGIQSPRPAGPMQTATTLDEVCEHHLATLLARQPHGPYYLLGYSLGGTLAQGIAARLRARGETVAFLGLLDTWPPETQNWREKEANGLNPDVLAEIERERAAFVAAQQGNASEALFTAIEGNYADAVRLLTTAHSVPFDGHATLFVADKTVPEGVSPEQSWSPWIASLAIYRQPCAHVDIISPSAFETIGPIISELINK

SEQ ID NO: 93097 - protein, 1294 aa, unidentified
  source 1..1294: note = Salmonella blockley
  REGION 1..1294: note = tr|A0A5I2JXK1|A0A5I2JXK1_SALBL Enterobactin non-ribosomal peptide synthetase EntF OS=Salmonella blockley OX=57741 GN=entF PE=4 SV=1
MTQRLPLVAAQPGIWMAEKLSDLPSAWSVAHYVELNGELDAALLAKAVAVGMQQADTLRMRFTEENGEVWQWIDPEHTFGEPPIADLRDHPDPHHAALALMQADLRQNLRADSGKPLAFHQLIRIDDTRWYWYQRYHHLLVDGFSFPAITRQIAAIYRAWQSDAPTPESPFTPFADVVEEYQRYRQSEAWQRDGAFWAQQRRELPPPASISAAPLPGRSASADILRMKLSAPAGAFRQLAAHMPEIPRADLALALVTLWLGRLCGRMDYAAGFIFMRRMGSAALTATGPVLNVLPLAVNLHATEDLPTLAKRLAAQLKKMRRHQRYDAEQIVRDSGRAAGETPLFGPVLNIKVFDYHLDLPGIQAQTHTLATGPVNDLELALFPDENGGLDIELLANAQRYDDATLSRHALRLMALITQFADNPALRCGDAQMLLAEEQTQLTHLNNTAVTIPAATLSDLVAQQAQKTPEASALADAHYHFTYREMREQVVALAYALRERGVQPGDSVAVALPRSVFLTLALHGIVEAGAAWLPLDTGYPDDRLRMMLEDAQPKLLITTQAQLARFHDIPGMEYLCYSQPLPVSNATPLGLSLPHHTAYIIFTSGSTGRPKGVMVGQTAIVNRLLWMQDHYPLTADDVVAQKTPCSFDVSVWEFFWPFIAGAKLVMAEPEAHRDPLAMQRFFAQYGVTTTHFVPSMLAAFIASLTPASAGKSCTSLKRVFCSGEALPTALCREWETLTNAPLHNLYGPTEAAVDVSWYPACGDELAAVDGNSIPIGYPVWNTGLRILDAHMQPVPPGVAGDLYLTGIQLAQGYLGRPDLTASRFIADPFAPGERMYRTGDVARWLDSGAVEYLGRSDDQLKIRGQRIELGEIDRVMQTLPDVEQAVAYACVFNQAAATGGDARQLVGYLVSHSGLPLDLPALQEKLRQKLPAHMVPVVLLQLAGLPLSANGKLDRKALPLPDLTPRVKGRAPQSATEIAVAAAFSRLLGCEINDVESDFFALGGHSLLAMKLAAQLSQTFNRQVTPGQVMVASDVAQLSKLLDTDDDERSRNLGFGPLLPLRESDGPTLFCFHPASGFAWQFSVLSRYLSPSWSIMGIQSPRPAGPMQTATTLDEVCEHHLATLLARQPHGPYYLLGYSLGGTLAQGIAARLRARGETVAFLGLLDTWPPETQNWREKEANGLNPDVLAEIERERAAFVAAQQGNASEALFTAIEGNYADAVRLLTTAHSVPFDGHATLFVADKTVPEGVSPEQSWSPWIASLAIYRQPCAHVDIISPSAFETIGPIISELINK

SEQ ID NO: 93098 - protein, 1294 aa, Salmonella bongori
  REGION 1..1294: note = tr|A0A5I6N1K6|A0A5I6N1K6_SALBN Enterobactin non-ribosomal peptide synthetase EntF OS=Salmonella bongori CFSAN000510 OX=1299282 GN=entF PE=4 SV=1
MTQRLPLVAAQPGIWMAEKLSDLPSAWSVAHYVELTGELDAVLLAKAVTAGMRQADTLQMRFTEENGEVWQWIDPGHTFGEPTITDLRDQTDPHQAALDIMQADLRQNLRADSGKPLAFHQLMRIDDTRWYWYQRYHHLLVDGFSFPAITRQIVAIYRAWRSGVPTPDSPFTPFADVVEEYLRYRQSEAWQRDGAFWAQQRCELPPPASISAAPLPGRPANAETLRMKLTAPEGAFRQLAAQMPDIPRADLALALVTLWLGRLCGRMNYAAGFIFMRRMGSAALTATGPVLNVLPLAVNIHATENLPMLARRLATQLKKMRRHQRYDAEQIVRDSGRAAGETPLFGPVLNIKVFDYHLDFPDIQAQTHTLATGPVNDLELALFPDENGGLDVELLANSQRYDEATLSRHALRLMALIRQFADNPALCCGDAQMLLADETEQLTRLNDTAVTIPVATLSDLVAQQARKTPQAPALIDAHYHFTYREMREQVVALAHALRERGVQPGDSVAVALPRSVFLTLALHGIVEAGAAWLPLDTGYPDDRLRMMLEDAQPKLLITTQAQLVRFHDIPGMEYFCYSEPLPGGDTTPLGLSLPQHTAYIIFTSGSTGRPKGVMVGQTAIVNRLLWMQDHYPLNADDVVAQKTPCSFDVSVWEFFWPFITGAKLVMAEPEAHRDPLAMQQFFAQYGVTTTHFVPSMLAAFIASLTPESAESACATLKRVFCSGEALPTALCRDWEMLTAVPLHNLYGPTEAAVDVSWYPACGTELSANGGNSIPIGYPVWNTGLRILDAHMQPVPPGVAGDLYLTGIQLAQGYLGRPDLTACRFIADPFAPGERMYRTGDVARWLDSGAVEYLGRSDDQLKIRGQRIELGEIDRVMQMLPDVEQAVAHACIFNQAAATEGDARQLVGYLVSHSGLPLDLSALQEKLRQKLPAHMVPVVLLQLASLPLSANGKLDRKALPLPELTPRVNGRAPQSATERAVAAAFSRLLGCEINDVESDFFALGGHSLLAMKLAAQLSRTFNRQVTPGQVMVASDVAQLSKLLETDDDERSRNLGFGPLLPLRESNGPTLFCFHPASGFAWQFSVLSRYLSPPWSIIGIQSPRPVGPLQTAANLDEVCERHLATLLARQPHGPYYLLGYSLGGTLAQGIAARLRARGETVAFLGLLDTWPPETQNWRKKEANGLNPDVLAEIERERAAFVAAQQGKASEAFFAAIEGNYADAVRLLTTAHSVPFDGHATLFVADKTVPEGVSPEQSWLPWIASMTIYRQPCAHVDIISPTAFETIGPVINALINK

SEQ ID NO: 93099 - protein, 1294 aa, unidentified
  source 1..1294: note = Salmonella derby
  REGION 1..1294: note = tr|A0A4Z8UMA8|A0A4Z8UMA8_SALDE Enterobactin non-ribosomal peptide synthetase EntF OS=Salmonella derby; OX = 28144 GN=entF PE=4 SV=1
MTQRLPLVAAQPGIWMAEKLSDLPSAWSVAHYVELNGELDAPLLAKAVAVGMQQADTLRMRFTEENGEVWQWIDPEHTFGEPPIADLRDQPDPHHAAQVLMQADLRQNLRADSGKPLAFHQLIRIDDTRWYWYQRYHHLLVDGFSFPAITRQIAAIYRAWQSEAPTPESPFTPFVDVVEEYQRYRQSEAWQRDGAFWAQQRRELPPPASISAVPLPGRSASAGILRMKLSAPEGAFRQLAAHMPEIPRADLALALVTLWLGRLCGRMDYAAGFIFMRRMGSAALTATGPVLNVLPLAVNLHATEDLPTLAKRLAAQLKKMRRHQRYDAEQIVRDSGRAAGETPLFGPVLNIKVFDYHLDLPGIQAQTHTLATGPVNDLELALFPDENGGLDIELLANAQRYDGATLSRHALRLMALITQFADNPAMCCGDAQMLLAEEQTQLTHLNNTAVTIPAATLSDLVAQQAQKTPEAAALADAHYHFTYREMREQVVALAYALRERGVQPGDSVAVALPRSVFLTLALHGIVEAGAAWLPLDTGYPDDRLRMMLEDAQPKLLITTQAQLARFHDIPGMEYLCYSQPLPVSDATPLGLSLPHHTAYIIFTSGSTGRPKGVMVGQTAIVNRLLWMQDHYPLTADDVVAQKTPCSFDVSVWEFFWPFIAGAKLVMAEPEAHRDPLAMQRFFAQYGVTTTHFVPSMLAAFIASLTPASAGKSCASLTRVFCSGEALPTALCREWETLTNAPLHNLYGPTEAAVDVSWYPACGDELAAVDGNSIPIGYPVWNTGLRILDAHMQPVPPGVAGDLYLTGIQLAQGYLGRPDLTASRFIADPFAPGERMYRTGDVARWLDSGAVEYLGRSDDQLKIRGQRIELGEIDRVMQTLPDVEQAVAHACVFNQAAATGGDARQLVGYLVSHSGLPLDLPALQEKLRQKLPAHMVPVVLLQLAGLPLSANGKLDRKALPLPDLTPRVKGRAPQSATEIAVAAAFSRLLGCEINDVESDFFALGGHSLLAMKLAAQLSQTFNRQVTPGQVMVASDVAQLSKLLDTDDDERSRNLGFGPLLPLRESDGPTLFCFHPASGFAWQFSVLSRYLSPSWSIMGIQSPRPAGPMQTATTLDEVCEHHLATLLARQPHGPYYLLGYSLGGTLAQGIAARLRARGETVAFLGLLDTWPPETQNWREKEANGLNPDVLAEIERERAAFVAAQQGNASEALFTAIEGNYADAVRLLTTAHSAPFDGHATLFVADKTVPEGVSPEQSWSPWIASLAIYRQPCAHVDIISPSAFETIGPIISELINK

SEQ ID NO: 93100 - protein, 234 aa, unidentified
  source 1..234: note = Salmonella dublin
  REGION 1..234: note = tr|A0A5I9Y8J3|A0A5I9Y8J3_SALDU Enterobactin synthase subunit EntD OS=Salmonella dublin OX=98360 GN=entD PE=4; SV = 1
MRTSHFPLPFAGHRLHIVDFDASSFHEHDLLWLPHHDRLRSAGRKRKAEHLAGRIAAVHALREVGVRTVPGIGDKRQPLWPDGLFGSISHCATTALAVISQQRIGIDIEKIMSQHTATELAPSIIDSDERQILQASSLPFPLALTLAFSAKESVYKAFSDRVTLPGFDSAKVTSLTTTHISLHLLPAFAAMMAERTVRTEWFQRSNSVITLVSAITRFPHDRSAPASILSAIPR

SEQ ID NO: 93101 - protein, 1294 aa, Salmonella enterica
  REGION 1..1294: note = tr|A0A4S3IM00|A0A4S3IM00_SALET Enterobactin non-ribosomal peptide synthetase EntF OS=Salmonella enterica I OX=59201 GN=entF PE=4 SV=1
MTQRLPLVAAQPGIWMAEKLSDLPSAWSVAHYVELNGELDAALLAKAVAVGMQQADTLRMRFTEENGEVWQWIDPEHTFGEPPIADLRDQPDPHHAALALMQADLRQNLRADSGKPLAFHQLIRIDDTRWYWYQRYHHLLVDGFSFPAITRQIAAIYRAWQSDAPTPESPFTPFADVVEEYQRYRQSEAWQRDGAFWAQQRRELPPPASMSAAPLPGRSASADILRMKLSAPAGAFRQLAAHMPEIPRADLALALVTLWLGRLCGRMDYAAGFIFMRRMGSAALTATGPVLNVLPLAVNLHATEDLPTLAKRLAAQLKKMRRHQRYDAEQIVRDSGRAAGETPLFGPVLNIKVFDYHLDLPGIQAQTHTLATGPVNDLELALFPDENGGLDIELLANAQRYDDATLSRHALRLMALITQFADNPALRCGDAQMLLAEEQTQLAHLNNTAVTIPAATLSDLVAQQAQKTPEASALADAHYHFTYREMREQVVALAYALRERGVQPGDSVAVALPRSVFLTLALHGIVEAGAAWLPLDTGYPDDRLRMMLEDAQPKLLITTQAQLARFHDIPGMEYLCYSQPLPVSDATPLRLSLPHHTAYIIFTSGSTGRPKGVMVGQTAIVNRLLWMQDHYPLTADDVVAQKTPCSFDVSVWEFFWPFIAGAKLVMAEPEAHRDPLAMQRFFAQYGVTTTHFVPSMLAAFIASLTPASAGKSCASLKRVFCSGEALPTALCREWETLTNAPLHNLYGPTEAAVDVSWYPACGDELAAVDGNSIPIGYPVWNTGLRILDAHMQPVPPGVAGDLYLTGIQLAQGYLGRPDLTASRFIADPFAPGERMYRTGDVARWLDSGAVEYLGRSDDQLKIRGQRIELGEIDRVMQTLPDVEQAVAHACVFNQAAATGGDARQLVGYLVSHSGLPLDLPALQEKLRQKLPAHMVPVVLLQLASLPLSANGKLDRKALPLPDLAPRVKGRAPQSATEIAVAAAFSRLLGCEINDVESDFFALGGHSLLAMKLAAQLSQTFNRQVTPGQVMVASDVAQLSKLLDTDDDERSRNLGFGPLLPLRESDGPTLFCFHPASGFAWQFSVLSRYLSPSWSIMGIQSPRPAGPMQTATTLDEVCEHHLATLLARQPHGPYYLLGYSLGGTLAQGIAARLRARGETVAFLGLLDTWPPETQNWREKEANGLNPDVLAEIERERAAFVAAQQGNASDALFTAIEGNYADAVRLLTTAHSVPFDGHATLFVADKTVPEGVSPEQSWSPWIASLAIYRQPCAHVDIISPSAFETIGPIISELINK

SEQ ID NO: 93102 - protein, 229 aa, Salmonella enterica
  REGION 1..229: note = tr|A0A1S1A5D0|A0A1S1A5D0_SALER Enterobactin synthase subunit EntD OS=Salmonella enterica OX=28901 GN=entD PE=3; SV = 1
MLTSHFSLPFAEHRLHIVDFDASSFHEHDLLWLPHHDRLRSAGRKRKAEHLAGRIAAVHALRKVGVRTAPGIGDKRQPLWPDGVFGSISHCASTALAVISRQRIGVDIEKIMSQHTATELASSIIDSDERQILQASSLPFPLALTLAFSAKESVYKAFSDHATLPGFDSAKITSLTATQISLNLLPAFVTTMAERIVHIGWFQRDNSVITLCSWNDALSPRQERSRFYT

SEQ ID NO: 93103 - protein, 229 aa, Salmonella enterica
  REGION 1..229: note = tr|A0A5I3MI27|A0A5I3MI27_SALHO Enterobactin synthase subunit EntD OS=Salmonella enterica subsp. houtenae str. CFSAN000557 OX=1299292 GN=entD PE=4 SV=1
MLTSHSSLPFAEHRLHIVDFAASSFHEHDLLWLPHHDRLRSAGRKRKAEHLAGRIAAVHALREVGVRTTPGIGDKRQPLWPDGVFGSISHCASTALAVISRQRIGVDIEKIMSQHTAIELAPSIIDSDERQILQASQLPFPLALTLAFSAKESVYKAFSDHVTLPGFDSAKITSLTATQISLNLRPTFAATMAERIVRIGWFQRDNSVITLCSWNNALSPRQERSRFYT

SEQ ID NO: 93104 - protein, 229 aa, Salmonella enterica
  REGION 1..229: note = tr|A0A5I3P2A6|A0A5I3P2A6_SALER Enterobactin synthase subunit EntD OS=Salmonella enterica subsp. salamae str. CFSAN000559 OX=1299293 GN=entD PE=4 SV=1
MLTSHFPLPFAEHRLHIVDFDASSFHEHDLLWLPHHDRLRSAGRKRKAEHLAGRIAAVHALREVGVRTAPGIGDKRQPLWPDGIFGSISHCASTALAVISRQRVGVDIEKIMSQHTATELASSIIDSDERQILQASSLPFPLALTLSFSAKESVYKAFSDHVTLPGFDSAKITSLTATQISLNLRPTFAATMAERIVRIGWFQRDNSVITLCSWNNALSPRQERSRFYT

SEQ ID NO: 93105 - protein, 1294 aa, unidentified
  source 1..1294: note = Salmonella enteritidis
  REGION 1..1294: note = tr|A0A1R2PWS9|A0A1R2PWS9_SALEN Amino acid adenylation OS=Salmonella enteritidis OX=149539 GN=entF; PE = 4 SV=1
MTQRLPLVAAQPGIWMAEKLSDLPSAWSVAHYVELNGELDAALLAKAVAVGMQQADTLRMRFTEENGEVWQWIDPEHTFGEPPIADLRDHPDPHHAALALMQADLRQNLRADSGKPLAFHQLIRIDDTRWYWYQRYHHLLVDGFSFPAITRQIAAIYRAWQSDAPTPESPFTPFADVVEEYQRYRQSEAWQRDGAFWAQQRRELPPPASMSAAPLPGRSASADILRMKLNAPAGAFRQLAAHMPEIPRADLALALVTLWLGRLCGRMDYAAGFIFMRRMGSAALTATGPVLNVLPLAINLHATEDLPTLAKRLAAQLKKMRRHQRYDAEQIVRDSGRAAGETPLFGPVLNIKVFDYHLDLPGIQAQTHTLATGPVNDLELALFPDENGGLDIELLANAQRYDDATLSRHALRLMALITQFADNPALRCGDAQMLLAEEQTQLAHLNNTAVTIPAATLSDLVAQQAQKTPEASALADAHYHFTYREMREQVVALAYALRERGVQPGDSVAVALPRSVFLTLALHGIVEAGAAWLPLDTGYPDDRLRMMLEDAQPKLLITTQAQLARFHDIPGMEYLCYSQPLPVSDATPLGLSLPHHTAYIIFTSGSTGRPKGVMVGQTAIVNRLLWMQAHYPLTADDVVAQKTPCSFDVSVWEFFWPFIAGAKLVMAEPEAHRDPLAMQRFFAQYGVTTTHFVPSMLAAFIASLTPASAGKSCASLTRVFCSGEALPTALCREWETLTNAPLHNLYGPTEAAVDVSWYPACGDELAAVDGNSIPIGYPVWNTGLRILDAHMQPVPPGVAGDLYLTGIQLAQGYLGRPDLTASRFIADPFAPGERMYRTGDVARWLDSGAVEYLGRSDDQLKIRGQRIELGEIDRVMQTLPDVEQAVAHACVFNQAAATGGDARQLVGYLVSHSGLPLDLPALQEKLRQKLPAHMVPVVLLQLAGLPLSANGKLDRKALPLPDLTPRVKGRAPQSATEIAVAAAFSRLLGCEINDVESDFFALGGHSLLAMKLAAQLSQTFNRQVTPGQVMVASDVAQLSKLLDTDDDERSRNLGFGPLLPLRESDGPTLFCFHPASGFAWQFSVLSRYLSPSWSIMGIQSPRPAGPMQTATTLDEVCEHHLATLLARQPHGPYYLLGYSLGGTLAQGIAARLCARGETVAFLGLLDTWPPETQNWREKEANGLNPDVLAEIERERAAFVAAQQGNASDALFTAIEGNYADAVRLLTTAHSVPFDGHATLFVADKTVPEGVSPEQSWSPWIASLAIYRQPCAHVDIISPSAFETIGPIISELINK

SEQ ID NO: 93106 - protein, 234 aa, unidentified
  source 1..234: note = Salmonella gallinarum
  REGION 1..234: note = tr|A0A3V9NJW2|A0A3V9NJW2_SALGL Enterobactin synthase subunit EntD OS=Salmonella gallinarum OX=594 GN=entD PE=3; SV = 1
MLTSHFPPPFAGHRLHIVDFDTSSFREHDLLWLPHHDRLRSAGRKRKAEHLAGRIAAVHALREVGVRTVPGMGDKRQPLWPDGLFGSISHCATTALAVISQQRIGIDIEKIMSQHTATELAPSIIDSDERQILQASSLPFPLALTLAFSAKESVYKAFSDRVTLPGFDSAKVTSLTATHISLHLLPAFAAMMAERTVRTEWFQRSNSVITLVSAITRFPHDRSAPASILSAIPR

SEQ ID NO: 93107 - protein, 234 aa, unidentified
  source 1..234: note = Salmonella hadar
  REGION 1..234: note = tr|A0A3V2W4J3|A0A3V2W4J3_SALHA Enterobactin synthase subunit EntD OS=Salmonella hadar OX=149385 GN=entD PE=3; SV = 1
MRTSHFPLPFAGHRLHIVDFDASSFHEHDLLWLPHHDRLRSAGRKRKAEHLAGRIAAVHALREVGVRTVPGIGDKRQPLWPDGLFGSISHCATTALAVISRQRIGIDIEKIMSQHTATELAPSIIDSDERQILQASSLPFPIALTLAFSAKESVYKAFSDRVTLPGFNSAKVTSLTATHISLHLLPAFAATMTERTVRTEWFQRDNSVITLVSAITRFPHDRSAPASILSAIPR

SEQ ID NO: 93108 - protein, 1294 aa, unidentified
  source 1..1294: note = Salmonella infantis
  REGION 1..1294: note = tr|A0A3R0DBC3|A0A3R0DBC3_SALIN Enterobactin non-ribosomal peptide synthetase EntF OS=Salmonella infantis OX=595 GN=entF PE=4 SV=1
MTQRLPLVAAQPGIWMAEKLSDLPSAWSVAHYVELNGELDAPLLAKAVAVGMQQADTLRMRFTEENGEVWQWIDPEYTFGEPTIADLRDQPDPHHAALALMQADLRQNLRADSGKPLAFHQLICIDDTRWYWYQRYHHLLVDGFSFPAITRQIAAIYRAWQSDAPTPESPFTPFADVVEEYQRYRQSEAWQRDGAFWAQQRRELPPPASISAAPLPGRSASADILRMKLSAPAGAFRQLAAHMPEIPRADLALALVTLWLGRLCGRMDYAAGFIFMRRMGSAALTATGPVLNVLPLAVNLHATEDLPTLAKRLAAQLKKMRRHQRYDAEQIVRDSGRAAGDTPLFGPVLNIKVFDYHLDLPGIQAHTHTLATGPVNDLELALFPDENGGLDIELLANAQRYDDVTLSRHALRLMALITQFADNPALRCGDAQMLLAEEQTQLAHLNNTAVTIPAATLSDLVAQQAQKTPEASALADAHYHFTYREMREQVVALAYALRERGVQPGDSVAVALPRSVFLTLALHGIVEAGAAWLPLDTGYPDDRLRMMLEDAQPKLLITTQAQLARFHDIPGMEYLCYSQPLPVSDATPLGLSLPHHTAYIIFTSGSTGRPKGVMVGQTAIVNRLLWMQDHYPLTADDVVAQKTPCSFDVSVWEFFWPFIAGAKLVMAEPEAHRDPLAMQRFFAQYGVTTTHFVPSMLAAFIASLTPASAGKSCASLKRVFCSGEALPTALCREWETLTNAPLHNLYGPTEAAVDVSWYPACGDELAAVDGNSIPIGYPVWNTGLRILDAHMQPVPPGVAGDLYLTGIQLAQGYLGRPDLTASRFIADPFAPGERMYRTGDVARWLDSGAVEYLGRSDDQLKIRGQRIELGEIDRVMQTLPDVEQAVAHACVFNQAAATGGDARQLVGYLVSHSGLPLDLPALQEKLRQKLPAHMVPVVLLQLAGLPLSANGKLDRKALPLPDLTPRVKGRAPQSATEIAVAAAFSRLLGCEINDVESDFFALGGHSLLAMKLAAQLSQTFNRQVTPGQVMVASDVAQLSKLLDTDDDERSRNLGFGPLLPLRESDGPTLFCFHPASGFAWQFSVLSRYLSPSWSIMGIQSPRPAGPMQTAATLDEVCEHHLATLLARQPHGPYYLLGYSLGGTLAQGIAARLRARGETVAFLGLLDTWPPETQNWREKEANGLNPDVLAEIERERAAFVAAQQGNASEALFTAIEGNYADAVRLLTTAHSVPFDGHATLFVADKTVPEGVSPEQSWSPWIASLAIYRQPCAHVDIISPSAFETIGPIISELINK

SEQ ID NO: 93109 - protein, 234 aa, unidentified
  source 1..234: note = Salmonella montevideo
  REGION 1..234: note = tr|A0A3U8JL26|A0A3U8JL26_SALMO Enterobactin synthase subunit EntD OS=Salmonella montevideo OX=115981 GN=entD; PE = 3 SV=1
MRTSHFPLPFAGHRLHIVDFDASSFHEHDLLWLPHHDRLRSAGRKRKAEHLAGRIAAVHALREVGVRTVPGIGDKRQPLWPDGLFGSISHCASTALAVISRQRIGIDIEKIMSQHTATELAPSIIDSDEHQILQASSLPFPLALTLAFSAKESVYKAFSDRVTLPGFDSAKVTSLTATHISLHLLPAFAATMAERTVRTEWFQRDNSVITLVSAITRFPHDRSAPASILSAIPR

SEQ ID NO: 93110 - protein, 1294 aa, unidentified
  source 1..1294: note = Salmonella moscow
  REGION 1..1294: note = tr|A0A5H7LHR2|A0A5H7LHR2_SALMC Enterobactin non-ribosomal peptide synthetase EntF OS=Salmonella moscow; OX = 28146 GN=entF PE=4 SV=1
MTQRLPLVAAQPGIWMAEKLSDLPSAWSVAHYVELNGELDAALLAKAVAVGMQQADTLRMRFTEENGEVWQWIDPEHTFGEPPIADLRDHPDPHHAALALMQADLRQNLRADSGKPLAFHQLIRIDDTRWYWYQRYHHLLVDGFSFPAITRQIAAIYRAWQSDAPTPESPFTPFADVVEEYQRYRQSEAWQRDGAFWAQQRRELPPPASMSAAPLPGRSASADILRMKLNAPAGAFRQLAAHMPEIPRADLALALVTLWLGRLCGRMDYAAGFIFMRRMGSAALTATGPVLNVLPLAINLHATEDLPTLAKRLAAQLKKMRRHQRYDAEQIVRDSGRAAGETPLFGPVLNIKVFDYHLDLPGIQAQTHTLATGPVNDLELALFPDENGGLDIELLANAQRYDDATLSRHALRLMALITQFADNPALRCGDAQMLLAEEQTQLAHLNNTAVTIPAATLSDLVAQQAQKTPEASALADAHYHFTYREMREQVVALAYALRERGVQPGDSVAVALPRSVFLTLALHGIVEAGAAWLPLDTGYPDDRLRMMLEDAQPKLLITTQAQLARFHDIPGMEYLCYSQPLPVSDATPLGLSLPHHTAYIIFTSGSTGRPKGVMVEQTAIVNRLLWMQAHYPLTADDVVAQKTPCSFDVSVWEFFWPFIAGAKLVMAEPEAHRDPLAMQRFFAQYGVTTTHFVPSMLAAFIASLTPASAGKSCASLTRVFCSGEALPTALCREWETLTNAPLHNLYGPTEAAVDVSWYPACGDELAAVDGNSIPIGYPVWNTGLRILDAHMQPVPPGVAGDLYLTGIQLAQGYLGRPDLTASRFIADPFAPGERMYRTGDVARWLDSGAVEYLGRSDDQLKIRGQRIELGEIDRVMQTLPDVEQAVAHACVFNQAAATGGDARQLVGYLVSHSGLPLDLPALQEKLRQKLPAHMVPVVLLQLAGLPLSANGKLDRKALPLPDLTPRVKGRAPQSATEIAVAAAFSRLLGCEINDVESDFFALGGHSLLAMKLAAQLSQTFNRQVTPGQVMVASDVAQLSKLLDTDDDERSRNLGFGPLLPLRESDGPTLFCFHPASGFAWQFSVLSRYLSPSWSIMGIQSPRPAGPMQTATTLDEVCEHHLATLLARQPHGPYYLLGYSLGGTLAQGIAARLCARGETVAFLGLLDTWPPETQNWREKEANGLNPDVLAEIERERAAFVAAQQGNASDALFTAIEGNYADAVRLLTTAHSVPFDGHATLFVADKTVPEGVSPEQSWSPWIASLAIYRQPCAHVDIISPSAFETIGPIISELINK

SEQ ID NO: 93111 - protein, 1294 aa, unidentified
  source 1..1294: note = Salmonella muenchen
  REGION 1..1294: note = tr|A0A4Z9NCN1|A0A4Z9NCN1_SALMU Enterobactin non-ribosomal peptide synthetase EntF OS=Salmonella muenchen OX=596 GN=entF PE=4 SV=1
MTQRLPLVAAQPGIWMAEKLSDLPSAWSVAHYVELNGELDAALLAKAVAVGMQQADTLRMRFTEENGEVWQWIDPEHTFGEPPIADLRDQPDPHHAALALMQADLRQNLRADSGKPLAFHQLIRIDDTRWYWYQRYHHLLVDGFSFPAITRQIAAIYHAWQSDAPTPESPFTPFADVVEEYQRYRQSEAWQRDGAFWAQQRRELPPPASISAAPLPGRSASAGILRMKLSAPAGAFRQLAAHMPEIPRADLALALVTLWLGRLCGRMDYAAGFIFMRRMGSAALTATGPVLNVLPLAVNLHATEDLPTLAKRLAAQLKKMRRHQRYDAEQIVRDSGRAAGETPLFGPVLNIKVFDYYLDLPGIQAQTHTLATGPVNDLELALFPDENGGLDIELLANAQRYDDATLSRHALRLMALITQFADNPALRCGDAQMLLAEEQTQLTHLNNTAVTIPAATLSDLVAQQAQKTPEASALADAHYHFTYREMREQVVALAYALRERGVQPGDSVAVALPRSVFLTLALHGIVEAGAAWLPLDTGYPDDRLRMMLEDAQPKLLITTQAQLARFHDIPGMEYLCYSQPLPVSDATPLGLSLPHHTAYIIFTSGSTGRPKGVMVGQTAILNRLLWMQDHYPLTADDVVAQKTPCSFDVSVWEFFWPFIAGAKLVMAEPEAHRDPLAMQRFFAQYGVTTTHFVPSMLAAFIASLTPASAGKSCASLKRVFCSGEALPTALCREWETLTNAPLHNLYGPTEAAVDVSWYPACGDELAAVDGNSIPIGYPVWNTGLRILDAHMQPVPPGVAGDLYLTGIQLAQGYLGRPDLTASRFIADPFAPGERMYRTGDVARWLDSGAVEYLGRSDDQLKIRGQRIELGEIDRVMQTLPDVEQAVAHACVFNQAAATGGDARQLVGYLVSHSGLPLDLPALQEKLRQKLPAHMVPVVLLQLAGLPLSANGKLDRKALPLPDLTPRVKGRAPQSATEIAVAAAFSRLLGCEINDVESDFFALGGHSLLAMKLAAQLSQTFNRQVTPGQVMVASDVAQLSKLLDTDDDERSRNLGFGPLLPLRESDGPTLFCFHPASGFAWQFSVLSRYLSPSWSIMGIQSPRPAGPMQTATTLDEVCEHHLATLLARQPHGPYYLLGYSLGGTLAQGIAARLCARGETVAFLGLLDTWPPETQNWREKEANGLNPDVLAEIERERAAFVAAQEGNASEALFTAIEGNYADAVRLLTTAHSVPFDGHATLFVADKTVPEGVSPEQSWSPWIASLAIYRQPCAHVDIISPSAFETIGPIISELINK

SEQ ID NO: 93112 - protein, 1294 aa, unidentified
  source 1..1294: note = Salmonella muenster
  REGION 1..1294: note = tr|A0A5I5MMR4|A0A5I5MMR4_SALMS Enterobactin non-ribosomal peptide synthetase EntF OS=Salmonella muenster OX=82689 GN=entF PE=4 SV=1
MTQRLPLVAAQPGIWMAEKLSDLPSAWSVAHYVELNGELDVPLLAKAVAVGMQQADTLRMRFTEESGEVWQWIDPEHTFGEPPIADLRDQPDPHHAALTLMQADLRQNLRADSGKPLAFHHLIRIDDTRWYWYQRYHHLLVDGFSFPAITRQIAAIYRAWQSEAPTPESPFTPFADVVEEYQRYRQSEAWQRDGAFWAQQRRELPPPASISAAPLPGRSASADILRMKLSAPEGAFRQLVAHMPEIPRADLALALVTLWLGRLCGRMDYAAGFIFMRRMGSAALTATGPVLNVLPLAVNLHATEDLPTLAKRLAAQLKKMRRHQRYDAEQIVRDSGRAAGETPLFGPVLNIKVFDYHLDLPGIQAQTHTLATGPVNDLELALFPDENGGLDIELLANAQRYDDATLSRHALRLMALITQFADNPALRCGDAQMLLAEEQTQLTHLNNTAVTIPAATLSDLVAQQAQKTPEAFALADAHYRFTYREMREQVVALAYALRERGVQPGDSVAVALPRSVFLTLALHGIVEAGAAWLPLDTGYPDDRLRMMLEDAQPKLLITTQAQLARFHDIPGMEYLCYSQPLPVSDATSLGLSLPHHTAYIIFTSGSTGRPKGVMVGQTAIVNRLLWMQDHYPLTADDVVAQKTPCSFDVSVWEFFWPFIAGAKLVMAEPEAHRDPLAMQRFFAQYGVTTTHFVPSMLAAFIASLTPASAGKSCASLKRVFCSGEALPTALCREWETLTNAPLHNLYGPTEAAVDVSWYPACGDELAAVDGNSIPIGYPVWNTGLRILDAHMQPVPPGVAGDLYLTGIQLAQGYLGRPDLTASRFIADPFAPGERMYRTGDVARWLDSGAVEYLGRSDDQLKIRGQRIELGEIDRVMQTLPDVELAVAHACVFNQAAATGGDARQLVGYLVSHSGLPLDLPALQEKLRQKLPAHMVPVVLLQLASLPLSANGKLDRKALPLPDLTPRVKGRAPQSATEIAVAAAFSRLLGCKINDVESDFFALGGHSLLAMKLAAQLSQTFNRQVTPGQVMVASDVAQLSKLLDTDDDERSRNLGFGPLLPLRESDGPTLFCFHPASGFAWQFSVLSRYLSPSWSIMGIQSPRPAGPMQTATTLDEVCEHHLATLLARQPHGPYYLLGYSLGGTLAQGIAARLRARGETVAFLGLLDTWPPETQNWREKEANGLNPDVLAEIERERAAFVAAQQGNASEALFTAIEGNYADAVRLLTTAHSVPFDGHATLFVADKTVPEGVSPEQSWSPWIASLAIYRQPCAHVDIISPSAFETIGPIISELINK

SEQ ID NO: 93113 - protein, 1294 aa, unidentified
  source 1..1294: note = Salmonella newport
  REGION 1..1294: note = tr|A0A4U7XPP0|A0A4U7XPP0_SALNE Enterobactin non-ribosomal peptide synthetase EntF OS=Salmonella newport OX=108619 GN=entF PE=4 SV=1
MTQRLPLVAAQPGIWMAEKLSDLPSAWSVAHYVELNGELDAPLLAKAVAVGMQQADTLRMRFTEENGEVWQWIDPEHTFGEPTIADLRDQPDPHHAALALMQADLRQNLRADSGKPLAFHQLIRIDDTRWYWYQRYHHLLVDGFSFPAITRQIAAIYRAWQSDAPTPESPFTPFADVVEEYQRYRQSEVWQRDGAFWAQQRRELPPPASISAAPLPGRSASADILRMKLSAPAGAFRQLAAHMPEIPRADLALALVTLWLGRLCGRMDYAAGFIFMRRMGSAALTATGPVLNVLPLAVNLHATEDLPTLAKRLAAQLKKMRRHQRYDAEQIVRDSGRAAGETPLFGPVLNIKVFDYYLDLPGIQAQTHTLATGPVNDLELALFPDENGGLDIELLANAQRYDDATLSRHALRLMALITQFADNPALRCGDAQMLLAEEQTQLTHLNNTAVTIPAATLSDLVAQQAQKTPEASALADAHYHFTYREMREQVVALAYALRERGVQPGDSVAVALPRSVFLTLALHGIVEAGAAWLPLDTGYPDDRLRMMLEDAQPKLLITTQAQLARFHDIPGMEYLCYSQPLPVSDATPLRLSLPHHTAYIIFTSGSTGRPKGVMVGQTAIVNRLLWMQDHYPLTADDVVAQKTPCSFDVSVWEFFWPFIAGAKLVMAEPEAHRDPLAMQRFFAQYGVTTTHFVPSMLAAFIASLTPASAGKSCASLTRVFCSGEALPTALCREWETLTNAPLHNLYGPTEAAVDVSWYPACGDELAAVDGNSIPIGYPVWNTGLRILDAHMQPVPPGVAGDLYLTGIQLAQGYLGRPDLTASRFIADPFAPGERMYRTGDVARWLDSGAVEYLGRSDDQLKIRGQRIELGEIDRVMQTLPDVEQAVAHACVFNQAAATGGDARQLVGYLVSHSGLPLDLPALQEKLRQKLPAHMVPVVLLQLAGLPLSANGKLDRKALPLPDLTPRVKGRAPQSATEIAVAAAFSRLLGCEINDVESDFFALGGHSLLAMKLAAQLSQTFNRQVTPGQVMVASDVAQLSKLLDTDDDERSRNLGFGPLLPLRESDGPTLFCFHPASGFAWQFSVLSRYLSPSWSIMGIQSPRPAGPMQTATTLDEVCEHHLATLLARQPHGPYYLLGYSLGGTLAQGIAARLCARGETVAFLGLLDTWPPETQNWREKEANGLNPDVLAEIERERAAFVAAQQGNASEALFTAIEGNYADAVRLLTTAHSVPFDGHATLFVADKTVPEGVSPEQSWSPWIASLAIYRQPCAHVDIISPSAFETIGPIISELINK

SEQ ID NO: 93114 - protein, 1294 aa, unidentified
  source 1..1294: note = Salmonella oranienberg
  REGION 1..1294: note = tr|A0A5I3WDL5|A0A5I3WDL5_SALON Enterobactin non-ribosomal peptide synthetase EntF OS=Salmonella oranienberg OX=28147 GN=entF PE=4 SV=1
MTQRLPLVAAQPGIWMAEKLSDLPSAWSVAHYVELNGELDAPLLAKAVAVGMQQADTLRMRFTEESGEVWQWIDPEHTFGEPPIADLRDQPDPHHAALTLMQADLRQNLRADSGKPLAFHQLIRIDDTRWYWYQRYHHLLVDGFSFPAITRQIAAIYRAWQSEAPTPESPFTPFADVVEEYQRYRQSEAWQRDGAFWAQQRRELPPPASMSAAPLPGRSASADILRMKLSAPEGAFRQLAAHMPEIPRADLALALVTLWLGRLCGRMDYAAGFIFMRRMGSAALTATGPVLNVLPLAVNLHATEDLPTLAKRLAAQLKKMRRHQRYDAEQIVRDSGRAAGETPLFGPVLNIKVFDYHLDLPGIQAQTHTLATGPVNDLELALFPDENGGLDIELLANAQRYDDATLSRHALRLMALITQFADNPALRCGDAQMLLAEEQTQLTHLNNTAVTIPAATLSDLVAQQAQKTPEAAALADAHYHFTYREMREQVVALAYALRERGVQPGDSVAVALPRSVFLTLALHGIVEAGAAWLPLDTGYPDDRLRMMLEDAQPKLLITTQAQLARFHDIPGMEYLCYSQPLPVSDATPLGLSLPHHTAYIIFTSGSTGRPKGVMVGQTAIVNRLLWMQDHYPLTADDVVAQKTPCSFDVSVWEFFWPFIAGAKLVMAEPEAHRDPLAMQRFFAQYGVTTTHFVPSMLAAFIASLTPASAGKSCASLKRVFCSGEALPTALCREWETLTNAPLHNLYGPTEAAVDVSWYPACGDELAAVDGNSIPIGYPVWNTGLRILDAHMQPVPPGVAGDLYLTGIQLAQGYLGRPDLTASRFIADPFAPGERMYRTGDVARWLDSGAVEYLGRSDDQLKIRGQRIELGEIDRVMQTLPDVEQAVAHACVFNQAAATGGDARQLVGYLVSHSGLPLDLPALQEKLRQKLPAHMVPVVLLQLASLPLSANGKLDRKALPLPDLTPRVKGRAPQSATEIAVAAAFSRLLVCEINDVESDFFALGGHSLLAMKLAAQLSQTFNRQVTPGQVMVASDVAQLSKLLDTDDDERSRNLGFGPLLPLRESDGPTLFCFHPASGFAWQFSVLSRYLSPSWSIMGIQSPRPAGPMQTATTLDEVCEHHLATLLARQPHGPYYLLGYSLGGTLAQGIAARLRARGETVAFLGLLDTWPPETQNWREKEANGLNPDVLAEIERERAAFVAAQQGNASEALFTAIEGNYADAVRLLTTAHSVPFDGHATLFVADKTVPEGVSPEQSWSPWIASLAIYHQPCAHVDIISPSAFETIGPIISELINK

SEQ ID NO: 93115 - protein, 1294 aa, unidentified
  source 1..1294: note = Salmonella paratyphi
  REGION 1..1294: note = tr|A0A5J2CK01|A0A5J2CK01_SALPT Enterobactin non-ribosomal peptide synthetase EntF OS=Salmonella paratyphi A OX=54388 GN=entF PE=4 SV=1
MTQRLPLVAAQPGIWMAEKLSDLPSAWSVAHYVELNGELDAPLLAKAVAVGMQQADTLRMRFTEENGEVWQWIDPEHTFGEPPIADLRDQPDPHHAALALMQADLRQNLRADSGKPLAFHQLIRIDDTRWYWYQRYHHLLVDGFSFPAITRQIAAIYRAWQSDAPTPESPFTPFADVVEEYQRYRQSEAWQRDGAFWAQQRRELPPPASISAAPLPGRSASAGILRMKLSAPAGAFRQLAAHMPEIPRADLALALVTLWLGRLCGRMDYAAGFIFMRRMGSAALTATGPVLNVLPLAVNLHATEDLPTLAKRLAAQLKKMRRHQRYDAEQIVRDSGRAAGETPLFGPVLNIKVFDYHLDLPGIQAQTHTLATGPVNDLELALFPDENGGLDIELLANAQRYDDATLSRHALRLMALITQFADNPALCCGDAQMLLAEEQTQLTHLNNTAVTIPAATLSDLVAQQAQKTPEASALADAHYHFTYREMREQVVALAYALRERGVQPGDSVAVALPRSVFLTLALHGIVEAGAAWLPLDTGYPDDRLRMMLEDAQPKLLITTQAQLARFHDIPGMEYLCYSQPLPVSDATPLGLSLPHHTAYIIFTSGSTGRPKGVMVGQTAIVNRLLWMQDHYPLTADDVVAQKTPCSFDVSVWEFFWPFIAGAKLVMAEPEAHRDPLAMQRFFAQYGVTTTHFVPSMLAAFIASLTPASAGKSCASLKRVFCSGEALPTALCREWETLTNAPLHNLYGPTEAAVDVSWYPACGDELAAVDGNSIPIGYPVWNTGLRILDAHMQPVPPGVAGDLYLTGIQLAQGYLGRPDLTASRFIADPFAPGERMYRTGDVARWLDSGAVEYLGRSDDQLKIRGQRIELGEIDRVMQTLPDVEQAVAHACVFNQAAATGGDARQLVGYLVSHSGLPLDLPALQEKLRQKLPAHMVPVVLLQLTSLPLSANGKLDRKALPLPDLTPRVKGRAPQSATEIAVAAAFSRLLGCEINDVESDFFALGGHSLLAMKLAAQLSQTFNRQVTPGQVMVASDVAQLSKLLDTDDDERSRNLGFGPLLPLRESDGPTLFCFHPASGFAWQFSVLSRYLSPSWSIMGIQSPCPAGPMQTATTLDEVCEHHLATLLARQPNGPYYLLGYSLGGTLAQGIAARLRAHGETVAFLGLLDTWPPETQNWREKEANGLNPDVLAEIERERAAFVAAQQGNASDALFTAIEGNYADAVRLLTTAHSVPFDGHATLFVADKTVPEGVSPEQSWSPWIASLAIYRQPCAHVDIISPSAFETIGPIISELINK

SEQ ID NO: 93116 - protein, 1294 aa, unidentified
  source 1..1294: note = Salmonella potsdam
  REGION 1..1294: note = tr|A0A5H6C651|A0A5H6C651_SALPO Enterobactin non-ribosomal peptide synthetase EntF OS=Salmonella potsdam OX=597 GN=entF PE=4 SV=1
MTQRLPLVAAQPGIWMAEKLSDLPSAWSVAHYVELNGELDVALLAKAVAVGMQQADTLRMRFTEENGEVWQWIDPEHTFGEPPIADLRDQPDPHHAALALMQADLRQNLRADSGKPLAFHQLIRIDDTRWCWYQRYHHLLVDGFSFPAITRQIAAIYRAWQSDAPTPESPFTPFADVVEEYQRYRQSEAWQRDGAFWAQQRRELPPPASISAAPLPGRSASADILRMKLSAPAGAFRQLAAHMPEIPRADLALALVTLWLGRLCGRMDYAAGFIFMRRMGSAALTATGPVLNVLPLAVNLHATEDLPTLAKRLAAQLKKMRRHQRYDAEQIVRDSGRAAGETPLFGPVLNIKVFDYHLDLPGIQAQTHTLATGPVNDLELALFPDENGGLDIELLANAQRYDDATLSRHALRLMALITQFADNPALRCGDAQMLLAEEQTQLTHLNNTAVTIPAATLSDLVAQQAQKTPEASALADAHYHFTYREMREQVVALAYALRERGVQPGDSVAVALPRSVFLTLALHGIVEAGAAWLPLDTGYPDDRLRMMLEDAQPKLLITTQAQLARFHDIPGMEYLCYSQPLPASDTTPLGLSLPHHTAYIIFTSGSTGRPKGVMVGQTAIVNRLLWMQDHYPLTADDVVAQKTPCSFDVSVWEFFWPFIAGAKLVMAEPEAHRDPLAMQRFFAQYGVTTTHFVPSMLAAFIASLTPASAGKSCASLKRVFCSGEALPTALCREWETLTNAPLHNLYGPTEAAVDVSWYPACGDELAAVDGNSIPIGYPVWNTGLRILDAHMQPVPPGVAGDLYLTGIQLAQGYLGRPDLTASRFIADPFAPGERMYRTGDVARWLDPGAVEYLGRSDDQLKIRGQRIELGEIDRVMQTLPDVEQAVAHACVFNQAAATGGDARQLVGYLVSHSGLPLDLPALQEKLRQKLPAHMVPVVLLQLAGLPLSANGKLDRKALPLPDLTPRVKGRAPQSATEIAVAAAFSRLLGCEINDVESDFFALGGHSLLAMKLAAQLSQTFNRQVTPGQVMVASDVAQLSKLLDTDDDERSRNLGFGPLLPLRESDGPTLFCFHPASGFAWQFSVLSRYLSPSWSIMGIQSPRPAGPMQTATTLDEVCEHHLATLLARQPHGPYYLLGYSLGGTLAQGSAARLCARGETVAFLGLLDTWPPETQNWREKEANGLNPDVLAEIERERAAFVAAQQGNASDALFTAIEGNYADAVRLLTTAHSVPFDGHATLFVADKTVPEGVSPEQSWSPWIASLAIYRQPCAHVDIISPSAFETIGPIISELINK

SEQ ID NO: 93117 - protein, 1294 aa, unidentified
  source 1..1294: note = Salmonella rubislaw
  REGION 1..1294: note = tr|A0A5H8TRF2|A0A5H8TRF2_SALRU Enterobactin non-ribosomal peptide synthetase EntF OS=Salmonella rubislaw OX=598 GN=entF PE=4 SV=1
MTQRLPLVAAQPGIWMAEKLSDLPSAWSVAHYVELNGELDAPLLAKAVAVGMQQADTLRMRFTEENGEVWQWIDPERTFGEPPIADLRDQPDPHHAALTLMQADLRQNLRADSGKPLAFHQLIRIDDTRWYWYQRYHHLLVDGFSFPAITRQIAAIYRAWQSEAPTPESPFTPFADVVEEYQRYRQSEAWQRDGAFWAQQRRELPPPASMSAAPLPGRSASADILRMKLSAPAGAFRQLVAHMPEIPRADLALALVTLWLGRLCGRMDYAAGFIFMRRMGSAALTATGPVLNVLPLAVNLHATEDLPTLAKRLAAQLKKMRRHQRYDAEQIVRDSGRAAGETPLFGPVLNIKVFDYHLDLPGIQAQTHTLATGPVNDLELALFPDENGGLDIELLANAQRYDDATLSRHALRLMALITQFADNPALRCGDAQMLLAEEQTQLTHLNNTAVTIPAATLSDLVAQQAQKTPEAAALADAHYHFTYREMREQVVALAYALRERGVQPGDSVAVALPRSVFLTLALHGIVEAGAAWLPLDTGYPDDRLRMMLEDAQPKLLITTQAQLARFHDIPGMEYLCYSQPLPVSDATPLGLSLPHHTAYIIFTSGSTGRPKGVMVGQTAIVNRLLWMQDHYPLTADDVVAQKTPCSFDVSVWEFFWPFIAGAKLVMAEPEAHRDPLAMQRFFAQYGVTTTHFVPSMLAAFIASLTPASAGKSCASLKRVFCSGEALPTALCREWETLTNAPLHNLYGPTEAAVDVSWYPACGDELAAVDGNSIPIGYPVWNTGLRILDAHMQPVPPGVAGDLYLTGIQLAQGYLGRPDLTASRFIADPFAPGERMYRTGDVARWLDSGAVEYLGRSDDQLKIRGQRIELGEIDRVMQTLPDVEQAVAHACVFNQAAATGGDARQLVGYLVSHSGLPLDLPALQEKLRQKLPAHMVPVVLLQLASLPLSANGKLDRKALPLPDLTPRVKGRAPQSATEIAVAAAFSRLLGCEINDVESDFFALGGHSLLAMKLAAQLSQTFNRQVTPGQVMVASDVAQLSKLLDTDDDERSRNLGFGPLLPLRESDGPTLFCFHPASGFAWQFSVLSRYLSPSWSIMGIQSPRPAGPMQTATTLDEVCEHHLATLLARQPHGPYYLLGYSLGGTLAQGIAARLRARGETVAFLGLLDTWPPETQNWREKEANGLNPDVLAEIERERAAFVAAQQGNASEALFTAIEGNYADAVRLLTTAHSVPFDGHATLFVADKTVPEGVSPEQSWSPWIASLAIYRQPCAHVDIISPSAFETIGPIISELINK

SEQ ID NO: 93118 - protein, 234 aa, unidentified
  source 1..234: note = Salmonella senftenberg
  REGION 1..234: note = tr|A0A401APN9|A0A401APN9_SALSE Enterobactin synthase subunit EntD OS=Salmonella senftenberg OX=28150 GN=entD; PE = 3 SV=1
MLTSHFPLPFAGHRLHIVDFDASSFHEHDLLWLPHHDRLRSAGHKRKAEHLAGRIAAVHALREVGVRAVPGIGEKRQPLWPDGLFGSISHCASTALAVISRQRIGIDIEKIMSQHTATELAPSIIDSDERQILQASSLPFPLALTLAFSAKESVYKAFSDCVTLPGFDSAKVTSLTATHISLYLLPAFAATMAERTVHTEWFQRDNSVITLVSAITRFPHDRSAPASILSAIPR

SEQ ID NO: 93119 - protein, 234 aa, unidentified
  source 1..234: note = Salmonella thompson
  REGION 1..234: note = tr|A0A3V4Q887|A0A3V4Q887_SALTH Enterobactin synthase subunit EntD OS=Salmonella thompson OX=600 GN=entD PE=3; SV = 1
MLTSHFPLPFAGHRLHIVDFDASSFHEHDLLWLPHHNRLRSAGRKRKAEHLAGRIAAVHALREVGVRTVPGIGDKRQPLWPDGLFGSISHCATTALAVISRQRIGIDIEKIMSQHTATELAPSIIDSDERQILQASSLPFPLALTLAFSAKESVYKAFSDRVTLPGFDSAKVTSLTATHISLHLLPAFAAMMAERTVRTEWFQRSNSVITLVSAITRFPHDRSAPASILSAIPR

SEQ ID NO: 93120 - protein, 234 aa, unidentified
  source 1..234: note = Salmonella typhi
  REGION 1..234: note = tr|A0A4U8DGH4|A0A4U8DGH4_SALTI Enterobactin synthase component D OS=Salmonella typhi OX=90370 GN=entD PE=3 SV=1
MLTSHFPLPFAGHRLHIVDFDASSFHEHDLLWLPHHDRLRSAGRKRKAEHLAGRIAAVHALREVGVRAVPGIGDKRQPLWPDGLFGSISHCASTALAVISRQRVGVDIEKIMSQHTATELAPSIIDSDERQILQASSLPFPLALTLAFSAKESVYKAFSDRVTLPGFDSAKITSLNATHISLHLLPAFAAMMAERTVRTEWFQRGNSVITLVSAITRFPHDRSAPASILSAIPR

SEQ ID NO: 93121 - protein, 1294 aa, unidentified
  source 1..1294: note = Salmonella typhimurium
  REGION 1..1294: note = tr|A0A5A8VWX5|A0A5A8VWX5_SALTM Enterobactin non-ribosomal peptide synthetase EntF OS=Salmonella typhimurium OX=90371 GN=entF PE=4 SV=1
MTQRLPLVAAQPGIWMAEKLSDLPSAWSVAHYVELNGELDAALLAKAVAVGMQQADTLRMRFTEENGEVWQWIDPEHTFGEPPIADLRDQPDPHHAALALMQADLRQNLRADSGKPLAFHQLIRIDDTRWYWYQRYHHLLVDGFSFPAITRQIAAIYRAWQSDAPTPESPFTPFADVVEEYQRYRQSEAWQRDGAFWAQQRRELPPPASMSAAPLPGRSASADILRMKLSAPAGAFRQLAAHMPEIPRADLALALVTLWLGRLCGRMDYAAGFIFMRRMGSAALTATGPVLNVLPLAVNLHATEDLPTLAKRLAAQLKKMRRHQRYDAEQIVRDSGRAAGETPLFGPVLNIKVFDYHLDLPGIQAQTHTLATGPVNDLELALFPDENGGLDIELLANAQRYDDATLSRHALRLMALITQFADNPALRCGDAQMLLAEEQTQLAHLNNTAVTIPAATLSDLVAQQAQKTPEASALADAHYHFTYREMREQVVALAYALRERGVQPGDSVAVALPRSVFLTLALHGIVEAGAAWLPLDTGYPDDRLRMMLEDAQPKLLITTQAQLARFHDIPGMEYLCYSQPLPVSDATPLRLSLPHHTAYIIFTSGSTGRPKGVMVGQTAIVNRLLWMQDHYPLTADDVVAQKTPCSFDVSVWEFFWPFIAGAKLVMAEPEAHRDPLAMQRFFAQYGVTTTHFVPSMLAAFIASLTPASAGKSCASLKRVFCSGEALPTALCREWETLTNAPLHNLYGPTEAAVDVSWYPACGDELAAVDGNSIPIGYPVWNTGLRILDAHMQPVPPGVAGDLYLTGIQLAQGYLGRPDLTASRFIADPFAPGERMYRTGDVARWLDSGAVEYLGRSDDQLKIRGQRIELGEIDRVMQTLPDVEQAVAHACVFNQAAATGGDARQLVGYLVSHSGLPLDLPALQEKLRQKLPAHMVPVVLLQLASLPLSANGKLDRKALPLPDLAPRVKGRAPQSATEIAVAAAFSRLLGCEINDVESDFFALGGHSLLAMKLAAQLSQTFNRQVTPGQVMVASDVAQLSKRLDTDDDERSRNLGFGPLLPLRESDGPTLFCFHPASGFAWQFSVLSRYLSPSWSIMGIQSPRPAGPMQTATTLDEVCEHHLATLLARQPHGPYYLLGYSLGGTLAQGIAARLRARGETVAFLGLLDTWPPETQNWREKEANGLNPDVLAEIERERAAFVAAQQGNASDALFTAIEGNYADAVRLLTTAHSVPFDGHATLFVADKTVPEGVSPEQSWSPWIASLAIYRQPCAHVDIISPSAFETIGPIISELINK

SEQ ID NO: 93122 - protein, 1294 aa, unidentified
  source 1..1294: note = Salmonella virchow
  REGION 1..1294: note = tr|A0A3V4BDZ6|A0A3V4BDZ6_SALVI Enterobactin non-ribosomal peptide synthetase EntF OS=Salmonella virchow OX=48409 GN=entF PE=4 SV=1
MTQRLPLVAAQPGIWMAEKLSDLPSAWSVAHYVELNGELDAALLAKAVAVGMQQADTLRMRFTEENGEVWQWIDPEHTFGEPPLADLRDHPDPHHAALALMQADLRQNLRADSGKPLAFHQLIRIDDTRWYWYQRYHHLLVDGFSFPAITRQIAAIYRAWQSDAPTPESPFTPFADVVEEYQRYRQSEAWQRDGAFWAQQRRELPPPASMSAAPLPGRSASADILRMKLSAPAGAFRQLAAHMPEIPRADLALALVTLWLGRLCGRMDYAAGFIFMRRMGSAALTATGPVLNVLPLAVNLHATEDLPTLAKRLAAQLKKMRRHQRYDAEQIVRDSGRAAGETPLFGPVLNIKVFDYHLDLPGIQAQTHTLATGPVNDLELALFPDENGGLDIELLANAQRYDDATLSRHALRLMALITQFADNPALRCGDAQMLLAEEQTQLTHLNNTAVTIPAATLSDLVAQQAQKTPEASALADAHYHFTYREMREQVVALAYALRERGVQPGDSVAVALPRSVFLTLALHGIVEAGAAWLPLDTGYPDDRLRMMLEDAQPKLLITTQAQLARFHDIPGMEYLCYSQPLPVSDATPLGLSLPHHTAYIIFTSGSTGRPKGVMVGQTAIVNRLLWMQDHYPLTADDVVAQKTPCSFDVSVWEFFWPFIAGAKLVMAEPEAHRDPLAMQRFFAQYGVTTTHFVPSMLAAFIASLTPASVGKSCASLKRVFCSGEALPTALCREWETLTNAPLHNLYGPTEAAVDVSWYPACGDELAAVDGNSIPIGYPVWNTGLRILDAHMQPVPPGVAGDLYLTGIQLAQGYLGRPDLTASRFIADPFAPGERMYRTGDVARWLDSGAVEYLGRSDDQLKIRGQRIELGEIDRVMQTLPDVEQAVAHACVFNQAAATGGDARQLVGYLVSHSGLPLDLPALQEKLRQKLPAHMVPVVLLQLAGLPLSANGKLDRKALPLPDLTPRVKGRAPQSATEIAVAAAFSRLLGCEINDVESDFFALGGHSLLAMKLAAQLSQTFNRQVTPGQVMVASDVAQLSKLLDTDDDERSRNLGFGPLLPLRESDGPTLFCFHPASGFAWQFSVLSRYLSPSWSIMGIQSPRPAGPMQTATTLDEVCEHHLATLLARQPHGPYYLLGYSLGGTLAQGIAARLCARGETVAFLGLLDTWPPETQNWREKEANGLNPDVLAEIERERAAFVAAQQGNASDALFTAIEGNYADAVRLLTTAHSVPFDGHATLFVADKTVPEGVSPEQSWSPWIASLAIYRQPCAHVDIISPSAFETIGPIISELINK

SEQ ID NO: 93123 - protein, 1293 aa, Shigella boydii
  REGION 1..1293: note = tr|A0A3S0P2F9|A0A3S0P2F9_SHIBO Enterobactin non-ribosomal peptide synthetase EntF OS=Shigella boydii; OX = 621 GN=entF PE=4 SV=1
MSQHLPLVAAQPGIWMAEKLSDLPSAWSVAHYVELTGEVDAPLLARAVVAGLAQADTLRMRFTEDNGEVWQWVDDAQTFELPEIIDLRTNIDPHGTARALMQADLQQDLRVDSGKPLVFHQLIQVADNRWYWYQRYHHLLVDGFSFPAITRQIANIYCAWLRGEPTPASPFTPFADVVEEYQQYRESEAWQRDAAFWAEQRRQLPPPASLSPAPLPGRSASADILRLKLEFTDGEFRQLATQLSGVQRTDLALALVALWLGRLCNRMDYAAGFIFMRRLGSAALTATGPVLNVLPLGIHIEAQETLPQLATRLAAQLKKMRRHQRYDAEQIVRDSGRAAGDEPLFGPVLNIKVFDYQLDIPGVQAQTHTLATGPVNDLELALFPDEHGDLSIEILANKQRYDEPTLIQHAERLKMLIAQFAADPALLCGDVDIMLPGEYVQLAQINATQVEIPETTLSALVAEQAAKTPDAPALADARYQFSYLEMREQVVALANLLRERGVKPGDSVAVALPRSVFLTLALHAIVETGAAWLPLDTGYPDDRLKMMLEDARPSLLITTDDQLPRFADVPDLTSLCYNAPLTPQGSAPLQLSQPHHTAYIIFTSGSTGRPKGVMVGQTAIVNRLLWMQNHYPLTGEDVVAQKTPCSFDVSVWEFFWPFIAGAKLVMAEPEAHRDPLAMQQFFAEYGVTTTHFVPSMLAAFVASLTPQTARQNCATLKQVFCSGEALPADLCREWQQLTSAALHNLYGPTEAAVDVSWYPAFGEELAQVRGSSVPIGYPVWNTGLRILDAIMHPVPPGVAGDLYLTGIQLAQGYLGRPDLTASRFIADPFAPGERMYRTGDVARWLDNGAVEYLGRSDDQLKIRGQRIELGEIDRVMQALPDVEQAVTHACVINQAAATGGDARQLVGYLVSQSGLPLDTTALQAQLRETLPPHMVPVVLLQLPQLPLSANGKLDRKALPLPELKAQAPGRAPKAGSETIIAAAFSSLLGCDVQDADADFFALGGHSLLAMKLAAQLSRQFTRQVTPGQVMVASTVAKLATIIDGEEDSSRRMGFETILPLREGNGPTLFCFHPASGFAWQFSVLSRYLDPQWSIIGIQSPRPHGPMQTAANLDEVCEAHLATLLEQQPHGPYYLLGYSLGGTLAQGIAARLRARGEQVAFLGLLDTWPPETQNWQEKEANGLDPEVLAEINREREAFLAAQQGSTSTDLFTTIEGNYADAVRLLTTAHSVPFEGKATLFVAERTLQEGMNPERAWSPWIAELDIYRQDCAHVDIISPGAFEKIGPIIRATLNR

SEQ ID NO: 93124 - protein, 285 aa, Shigella flexneri; identical to SEQ ID NO: 92339
  REGION 1..285: note = sp|P0ADI6|ENTB_SHIFL Enterobactin synthase component B OS=Shigella flexneri OX=623 GN=entB PE=3 SV=1

SEQ ID NO: 93125 - protein, 1297 aa, Shigella flexneri
  REGION 1..1297: note = tr|A0A4P7TPC4|A0A4P7TPC4_SHIFM Enterobactin non-ribosomal peptide synthetase EntF OS=Shigella flexneri serotype 5a (strain M90T) OX=1086030 GN=entF PE=4 SV=1
MSQHLPLVAAQPGIWMAEKLSDLPSAWSVAHYVELTGEVDAPLLARAVVAGLAQADTLRMRFTEDNGEVWQWVDDALIFELPEIIDLRTNIDPHGTAQALMLADLQQDLRVDSGKPLVFHQLIQVADNRWYWYQRYHHLLVDGFSFPAITRQIANIYCALLRGEPTPASPFTPFADVVEEYQQYRESEAWQRDAAFWVEQRRQLPPPASLSPAPLAGRSASADILRLKMEFTDGEFRQLATQLSGVQRTDLALALTALWLGRLCNRMDYAAGFIFMRRLGSAALTATGPVLNVLSLGIHIAAQETLPELATRLATRLAAQLKKMRRHQRYDAEQIVRDSGRAAGDEPLFGPVLNIKVFDYQLDIPGVQAQTHTLATGPVNGLELALFPDEHGDLSIEILANKQRYDEPTLIQHAERLKMLIAQFAADPALLCGDVDIMLPGEYAQLAQINATQVEIPETTLSALVAEQAAKTPDAPALADARYLFSYREMHEQVVALANLLRERGVKPGDSVAVALPRSVFLTLALHAIVEAGAAWLPLDTGYPDDRLKMMLEDARPSLLITTDDQLPRFSDVPNLTNLCYNAPLTPQGSAPLQLSQPHHTAYIIFTSGSTGRPKGVMVGQTAIVNRLLWMQNHYPLTGEDVVAQKTPCSFDVSVWEFFWPFIAGAKLVMAEPEAHRDPLAMQQFFAEYGVTTTHFVPSMLAAFVASLTPQTARQSCVTLKQVFCSGEALPADLCREWQQLTGAPLHNLYGPTEAAVDVSWYPAFGEELAQVRGSSVPIGYPVWNTGLRILDAMMHPVPPGVAGDLYLTGIQLAQGYLGRPDLTASRFIADPFAPGERMYRTGDVARWLDNGAVEYLGRSDDQLKIRGQRIELGEIDRVMQALPDVKQAVTHACVINQAAATGGDARQLVGYLVSQSGLPLDTSALQAQLRETLPPHMVPVVLLQLPQLPLSANGKLDRKALPLPELKAQAPGRAPKAGSETIIAAAFASLLGCDVQDADADFFALGGHSLLAMKLAAQLSRQFARQVTPGQVMVASTVAKLATIIDGEEDSSRRMGFETILPLREGNGPTLFCFHPASGFAWQFSVLSRYLDPQWSIIGIQSPRPHGPMQTATNLDEVCEAHLATLLEQQPHGPYYLLGYSLGGTLAQGIAARLRARGEQVAFLGLLDTWPPETQNWQEKEANGLDPEVLAEINREREAFLAAQQGSTSTELFTTIEGNYADAVRLLTTAHSVPFDGKATLFVAERTLQEGMSPERAWSPWIAELDIYRQDCAHVDIISPGAFVKIGPIIRATLNR

SEQ ID NO: 93126 - protein, 206 aa, Shigella flexneri; identical to SEQ ID NO: 93068
  REGION 1..206: note = tr|A0A5C2EC34|A0A5C2EC34_SHIFL Enterobactin synthase subunit EntD OS=Shigella flexneri Y OX=424720 GN=entD PE=3; SV = 1

SEQ ID NO: 93127 - protein, 1293 aa, Shigella sonnei
  REGION 1..1293: note = tr|A0A0I4Q0I6|A0A0I4Q0I6_SHISO Enterobactin non-ribosomal peptide synthetase EntF OS=Shigella sonnei; OX = 624 GN=entF PE=4 SV=1
MSQHLPLVAAQPGIWMAEKLSDLPSAWSVAHYVELTGDVDAPLLARAVVAGLAQADTLRMRFTEDNGEVWQWVDDALIFEQPEIIDLRTNIDPHGTAQALMLADLQQDLRVDSGKPLVFHQLIHVADNRWYWYQRYHHLLVDGFSFPAITRQIANIYCTWLRGEPTPASPFTPFADVVEEYQQYRESEAWQRDAAFWAEQRRQLPPPASLSPAPLPGRSASADILRLKLEFTDGEFRQLATQLSGVQRTDLALALAALWLGRLCNRMDYAAGFIFMRRLGSAALTASGPVLNVLPLGIHIAAQETLPELATRLAAQLKKMRRHQRYDAEQIVRDSGRAAGDEPLFGPVLNIKVFDYQLDIPGVQAQTHTLATGPVNDLELALFPDEHGDLSIEILANKQRYDEPTLIQHAERLKMLIAQFAADPALLCGDVDIMLPGEYAQLAQINATQVEIPETTLSALVAEQAAKTPDAPALADARYLFSYREMREQVVALANLLRERGVKPGDSVAVALPRSVFLTLALHAIVEAGAAWLPLDTGYPDDRLKMMLEDARPSLLITTDDQLPRFSDVPNLTSLCYNAPLTPQGSAPLQLSQPHHTAYIIFTSGSTGRPKGVMVGQTAIVNRLLWMQNHYPLTGEDVVAQKTPCSFDVSVWEFFWPFIAGAKLVMAEPEAHRDPLAMQQFFAEYGVTTTHFVPSMLAAFVASLTPQTARQSCATLKQVFCSGEALPADLCREWQQLTGAPLHNLYGPTEAAVDVSWYPAFGEELAQVRGSSVPIGYPVWNMGLRILDAMMHPVPPGVAGDLYLTGIQLAQGYLGRPDLTASRFIADPFAPGERMYRTGDVARWLDNGAVEYLGRSDDQLKIRGQRIELGEIDRVMQALPDVEQAVTHACVINQAAATGGDARQLVGYLVSQSGLPLDTSALQAQLRETLPPHMVPVVLLQLPQLPLSANGKLDRKALPLPELKTQASGRAPKAGSETIIAAAFASLLGCDVQDADADFFALGGHSLLAMKLAAQLSRQFARQVTPGQVMVASTVAKLATIIDGEEDSSRRMGFETILPLREGNGPTLFCFHPASGFAWQFSVLSRYLDPQWSIIGIQSPRPHGPMQTATNLDEVCEAHLATLLEQQPHGPYYLLGYSLGGTLAQGIAARLRARGEQVAFLGLLDTWPPETQNWQEKEANGLDPEVLAEINREREAFLAAQQGSTSTELFTTIEGNYADAVRLLTTAHSVPFDGKATLFVAERTLQEGMSPERAWSPWIAELDIYRQDCAHVDIISPGAFVKIGPIIRATLNR

SEQ ID NO: 93128 - protein, 224 aa, Streptomyces sp.
  REGION 1..224: note = tr|A0A2P8AK88|A0A2P8AK88_9ACTN Enterobactin synthase component B OS=Streptomyces sp. 111WW2 OX=1945515 GN=entB; PE = 4 SV=1
MSYSEEWVTARARDAYEHGRASFDVRPERTALLVIDMQDEFVRPGWSPYWVPAATRMAPRLRRLVEGCRSADVPVIWTIFDDTHLGLDRPRALSHLPHADTDWRRPGPAEVWDQLGRRSDEALIRKPSYGAFYDTPLDTMLRNLGRDTVIVTGTLTNYCCGTTARQAYERGYKVVFGADVTATDDESRQEPELAVLRKGFALVLTAEEITNQLATGARVRHGRH

SEQ ID NO: 93129 - protein, 435 aa, unidentified
  source 1..435: note = [Actinobacillus] rossii
  REGION 1..435: note = tr|A0A380TQV4|A0A380TQV4_9PAST Isochorismate synthase MenF OS=[Actinobacillus] rossii OX=123820 GN=menF; PE = 3 SV=1
MFGNFAFIFMNGIMFELLADKVNSYKIDAQSPMITAFRVEIAEFGDLLAWLKAQNMFPQYYLNFRDSERRVAALGKVRSFSNEIAAQRFITTTEYPLIGGLTFDKQSHFWLPRLLIEKESKQVSISVFVDNQVDLMQEKRAALNVIETLQNFTALEPLNLGVQLLEQKANQQEWCGWVEKALQAIKTGEFTKVVLANEMHFISEYPINAKDFLAESEKQNTGCYHFLYAENAESTFVGSTPERLFQRQGSLVKTEALAGTALMSDDAQQNQEQADWLLHDQKNDDENLLVVKDICDNLQAFVSDIQVGDVELKQLRRVQHLRRQIQAELKAPFADAACLQAIHPTAAVSGLPQQSALAFLQNTENFDRTWYAGTLGMMTKNQGEFCVTIRCAFIEQNKIRIFAGAGIVAGSVPLLEWQEIERKASGLVTLLNTGK

SEQ ID NO: 93130 - protein, 474 aa, unidentified
  source 1..474: note = [Brevibacterium] frigoritolerans
  REGION 1..474: note = tr|A0A4V3B8P5|A0A4V3B8P5_9BACI Isochorismate synthase MenF OS=[Brevibacterium] frigoritolerans; OX = 450367 GN=menF PE=3 SV=1
MITALKHTFTEIMKRALEEARQFDKPVILSQVKPLNDSMNPLHFYAAGERLFLGERFYWATPGSRFTITGLGNECTVENDSAESDRFGRIESDWKRFKKMVHYEDGAKSHIGTGALLFGGFSFDPHNRRNERWNKYPEAKFFLPSVMLTVKDGVSFLTINRVINPDDDLESCAKHFTSIAGEVLTEKASTGGESVNNYTLKEADTGTWLSAVQKATELIKSGELDKVVLAREVQLEYDHKINIYSTLSKLQTEQPTSFIFSFENGRQSFIGATPERLIKKENSRLLSTCLAGSIKRGKSKQEDTELGTELLNDEKNLIEHAIVVKMIKDSFEEYCSKVKVSDHPQLLKTKNIQHLYTPIEGSMKAGYSLLNLVEKLHPTPALGGYPKMAAVDIIREIEPMDRGWYAGPVGWLDAENNGEFAVAIRSGLIEGKQAILFAGCGIVAESDPQMEYQETLIKLKPMLSALGGVNHECK

SEQ ID NO: 93131 - protein, 450 aa, unidentified
  source 1..450: note = [Clostridium] indolis
  REGION 1..450: note = tr|A0A3P6KEZ9|A0A3P6KEZ9_9FIRM Isochorismate synthase family protein OS=[Clostridium] indolis OX=69825; GN = entC PE=4 SV=1
MTLDVKESEIVEAVYESNQTWVSVEAKLDYELDPTILFHVTEDCAGDRFYFKKNDNETSFFGYHAIKRFKNDFENKQSIFREWEKYKNDIELIHPSSEKHHLKICGGFQFSSHKSGDEWREFGINHFVLPEVLVTMEQGKTFITYTVESENFEIDAFLAIIDKLTQKDIQLNDKIGDIKRIDDIYKDEWRDLVKDTIDILDENKKIVLARKRLIIFDKNVNISYILNRAIQGEHNSYLFVLESQDSVFFSQTPEQLMEVSDDVLSTKAVAGTIKRTHQEEIDKANIDAFLNDEKNLNEHRFVVESILNDIKPYVEQITFNEKPQILTNDHLYHLYTKIKGRLTKTSYIGLLDNLHPTPALGGYPKDEAISYIEQYEFGTRGLYGAPVGYIDMYDNCEFIVAIRSMLIKKNQATLFAGCGIVHNSDADSEVAETAVKFSPMMKALGVEKYE

SEQ ID NO: 93132 - protein, 392 aa, unidentified
  source 1..392: note = [Curtobacterium] plantarum
  REGION 1..392: note = tr|A0A3M7UGI1|A0A3M7UGI1_9GAMM Isochorismate synthase OS=[Curtobacterium] plantarum OX=221276; GN = EBO33_09675 PE=4 SV=1
MVESLAFEHPLLQDFPALCRGFLFTSPWQSLTTQGCFTTLTAPVKQGEQLTGEFQQQLQHHFASARKQGIAHPILVGAIPFDVDQPAALFIPESYQTFNRDDLNASASLAEAELPQVRRRTAVPDHDIFIDMVAQAVAATQRGDLDKVVLSRLMDIVAEQPVDTAALMQRIVAQNPNSYHFHLPLPDGGALVGASPELMIRKQGRQFSSCPLAGSAPRHRDPQRDQASGDSLMHSAKDRHEHKLVTDAMRATLQPRSRLLSVPETPSLLTTATLWHLATQIQGDVLDDRENALSLACLLHPTPALSGFPHQRAQALIQRLEPFERQLFGGIVGWCDDQGNGEWVVTIRCGTVNGPRVRLFAGAGIVADSQPESEWRETGVKLDTMLRAFGLQ

SEQ ID NO: 93133 - protein, 474 aa, unidentified
  source 1..474: note = [Flavobacterium] thermophilum
  REGION 1..474: note = tr|A0A377G5F2|A0A377G5F2_9BACL Isochorismate synthase MenF OS=[Flavobacterium] thermophilum OX=1414643; GN = entC PE=3 SV=1
MGSRGWRGNFTKESVRIVAIGFQHTLQQQLHELAVRAARPFVSWTESLEGVDPVSFFMQGPSCGFRERFFWSDRSGGTILVGLGSVHAIETGEKDGRFREVDARRRQWASQIERHGDTDAPPLLFGGFSFDPHRTPTDVWRGFSAGKLIAPAVLLSMRNGQAKLTVTLPAGGGGREIEQVGRLLGRIAAPPLPAPLPALVAAREADSGRWMEAVRQAIASIRAGALDKVVLARARQLTFAGTIDAGSVLARLREQQPFAYLFAFEQDGRCLIGASPEQLVQKEGETCRSICLAGSARRGATVEEDERLGAWLLSDRKNRQEHQFVVRMISRLFAEVCEAVEMPDGPQLLKLPHIQHLCTPVVGRGCREPSVLRLVERMHPTPALGGTPRERAMETIRALEPLERGWYAAPIGWVDAYGDGEWAVAIRSALLAGSQAFLFAGCGIVADSDPQSEYEETNVKMAPMLSALGVMHHD

SEQ ID NO: 93134 - protein, 432 aa, unidentified
  source 1..432: note = [Haemophilus] felis
  REGION 1..432: note = tr|A0A1T0BBD9|A0A1T0BBD9_9PAST Isochorismate synthase MenF OS=[Haemophilus] felis OX=123822 GN=menF; PE = 3 SV=1
MDNLQFIKAQLMAQLETYQVQPEPAITCLKVVTTPSFNLLNWLKAQTSYPQFYLNIRDGSSVWASVGEVCRFEDMTQAEQFVTQQQLPLLGGMQFTGATEFILPRVLLRQNQQQLEVSLFISAQDLASNTTQLKQQILQELQHFERTLPFAPVQQSIQLQRQQADQAQWCNWVEQGLAQIKQGALRKIVLANESVFSTEKTLKGIDFLAESERHNLGCYHFLFAKNANSTFLGSTPELLYRRRAEQLKTEALAGTAFMTQDEALNEQQGQWLLHDPKNEYENQLVVNGICEQLEPFVNHIHIEPVELKKLRKVQHLRRKIQAELKQDAGDKDILKAIHPTAAIAGLPQQAAQKAIQNIENFDRRWYAGTLGYISPEQADFCVTIRSAFIEQQGHQSQLHVFAGAGIVEGSIPLLEWQEIERKATSLVSLLQQ

SEQ ID NO: 93135 - protein, 424 aa, unidentified
  source 1..424: note = [Pasteurella] mairii
  REGION 1..424: note = tr|A0A379B2T6|A0A379B2T6_9PAST Isochorismate synthase MenF OS=[Pasteurella] mairii OX=757 GN=menF PE=3; SV = 1
MDSFHFLKKQLIEKINTYQPQREEITVLQSQSVVEVNLLSWLKAQNAYPQFYLKRRDEAQIFVALGKVRSFSDTNSAQQFIETHDFTLIGGLTFDGETLLYLPRLLLLQEKDQLTAHLFIDNRIDWATEKAQLLPLLENLEKTTALLPIQQSIYQHSPTASQVQWCQWVENALQHIQQGHAGKIVLANETLFHTEQPLCAKEVLAESEQYNVGCYHFLLAWDAECSFIGSTPERLYQRDGDQLQTEALAGTAFMSEDEQLNRQQATWLLHDPKNIYENSLVVEDIQQNLHPFSTQIDVSELGIKQLRQVQHLRRPISAKLAKNCGDSVCLQAIHPTAAVAGLPRQAAKQFLQQTETFQRSWYAGTLGFMRQQQAEFCVTIRSAFIEQNKIRVFAGAGIVEGSIPLLEWQEIERKALGLISLLQE

SEQ ID NO: 93136 - protein, 411 aa, unidentified
  source 1..411: note = [Propionibacterium] humerusii
  REGION 1..411: note = tr|E4HM60|E4HM60_9ACTN Isochorismate synthase; OS = [Propionibacterium] humerusii HL044PA1 OX=765109; GN = HMPREF9607_02004 PE=4 SV=1
MALLRSWLRLESGFVPTLSCSDAISTLPGAEWLAEVLHWVPDGIDPWIWLAPDSDDVPAMVGWGVQRRFVASGHRAVECAWHHMASWANDHVVAFGSFPFSKTQEGFLVVPQVLIARQHLGSPTMVTGDASSLTRRDLYLKPPHIYTSAPAISEAQWTASVKAATRRLREDSELEKVVLARAVDVEADAPVSRTAVASRLASQFPGCWTYSHDGLVGATPELLVDCRDGLFRARVLAGTRKPEWADELLSNLKERREHELAVASVTGKLTEAGLSDATIRGPFRLELPNVVHLATDVTARVNGSNAARIVDAMHPTAAVCGTPREGAYRLIAEVESLDRERFAGPVGWMSSDGSGQWALALRCGQFSDDSRQIRLYAGAGIMPTSDPAKEWLEVGAKMAAFNGCLRQPTDS

SEQ ID NO: 93137 - protein, 459 aa, unidentified
  source 1..459: note = Acaryochloris marina
  REGION 1..459: note = tr|A8ZKD4|A8ZKD4_ACAM1 Isochorismate synthase MenF; OS = Acaryochloris marina (strain MBIC 11017) OX=329726; GN = menF PE=3 SV=1
MCLHRKIIDFIVDELKTLAENSQSKIVRLEVSIDHDIEPLHWLSQQKSIIKTYWSDRHDRFEMAGIGSADLVFSREKASSHVLFKRLRKFLSCKYSCVRYYGGICFSQNQIASYPWQDFGNHFFLVPKFEVFKDQAGTYLALNLLLHHSDNANKKIQQTLQELAAINFNLPHQQCEKPQLSKRVDFPNQLQWYNNVNKGLTYLDQGILEKVVLARQTEFTIVDSCQPEHLLSLIQKEQNCSFQFCFQLDRDKAFIGSTPERLYWRQSSQIQTEAIAGTRPRGASYQEDNNFAKELLSSPKEIREHKLVLKGLQETLSTLCHQVNIAEDPNLLRLNQVQHLYSHCSGILNPEISDADIINQLHPTPAVGGYPRQKALELIASLETFSRGFYASPIGWVALDSAEFLVSIRSGLIQRNKLILFAGAGIISDSQPEAEWEELENKIRNFLQVVSCQASVDII

SEQ ID NO: 93138 - protein, 477 aa, unidentified
  source 1..477: note = Acaryochloris sp.
  REGION 1..477: note = tr|A0A2W1JMJ6|A0A2W1JMJ6_9CYAN Salicylate biosynthesis isochorismate synthase OS=Acaryochloris sp. RCC1774 OX=1764569 GN=pchA PE=4 SV=1
MTVTPFPAKLLQDRKSLHELFVACQATARRKEHAQVVSLSLAIPAVDPLAVLERLRQPEHLHFYWEQRSQQIAIAATEPVLQLQIDGPQRFTQAQRFICTSLVDTVTAGALDLPCAGPHFFCSFTFFDETQRETRLFPAATVFLPRWQVARVRDQAVLVANLLVDAQTNLVQLTDEVWRQWQQLRSPQTNGRGTLQSAKLSSPVAADYPVLTETERFTTAVKNILQDIEAQGLQKLVLAHTLDVTVPEPPPLGHALATLRDRYPDCYVFSVSNGKGQAFMGASPERLIELCDRNLVTDALAGSAPRGQNLTEDTHLGTQLLGNPKDNHEHQVVLDFIQNCLWELGIQSQVSSPPHLLQLPNIQHLRTLVTAKIPQNLHLLEILEALHPTPAVAGAPQKIAQQQIRKHETFERHLYAAPIGWVDHQGNGEFTVGIRSALIDGCLTRLYAGAGIVAGSDPQRELAEIQLKLHTLLDALV

SEQ ID NO: 93139 - protein, 391 aa, Achromobacter sp.
  REGION 1..391: note = tr|A0A0M7NYE9|A0A0M7NYE9_9BURK Isochorismate synthase entC OS=Achromobacter sp. ATCC35328 OX=1806490; GN = entC PE=4 SV=1
MDTSLAEEVQQTMATLAPNRFFFMSPYRSFTTSGCFARFDEPAVNGDSPDSPFQQKLAALFADAKAQGIKNPVMVGAIPFDPRQPSSLYIPESWQSFSRQEKQASARRFTRSQSLNVVERQAIPEQTTFEQMVARAAALTATPQVDKVVLSRLIDITTDAAIDSGVLLERLIAQNPVSYNFHVPLADGGVLLGASPELLLRKDGERFSSIPLAGSARRQPDEVLDREAGNRLLASEKDRHEHELVTQAMKEVLRERSSELHVPSSPQLITTPTLWHLATPFEGKANSQENALTLACLLHPTPALSGFPHQAATQVIAELEPFDRELFGGIVGWCDSEGNGEWVVTIRCAKLRENQVRLFAGAGIVPASSPLGEWRETGVKLSTMLNVFGLH

SEQ ID NO: 93140 - protein, 215 aa, unidentified
  source 1..215: note = Acidimicrobiaceae bacterium
  REGION 1..215: note = tr|A0A351XEW8|A0A351XEW8_9ACTN Salicylate biosynthesis isochorismate synthase (Fragment); OS = Acidimicrobiaceae bacterium OX=2024894 GN=DCZ35_05370; PE = 4 SV=1
TIGVSIGTTSFVAATPERLVAVAGDRLHTAALAGSAPRHADPAIDAALGQGLLTSPKERSEHAVVVDAIDHALQRLGMVDHHPADPVLLRLHGIQHLHTPIDARLPRGIGLFDVVGALHPTPAVAGHPGGRSAELRSTHEGMDRGWFASPVGWLDSSGDGEFRVALRSALITDVETTLYAGAGVVRGSDPSRELLETDVKLGALLGPVIATSDTR

SEQ ID NO: 93141 - protein, 426 aa, unidentified
  source 1..426: note = Acidimicrobiales bacterium
  REGION 1..426: note = tr|A0A520WQ18|A0A520WQ18_9ACTN Isochorismate synthase OS=Acidimicrobiales bacterium OX=2201156; GN = EVA19_06700 PE=4 SV=1
MTTLAEPRQLTLIRKQIEEPVDLLALWASTSYHQKAYWTVPDTGFEFVALGKAQQFRTEERAARFQSVRAALDTLKIDLTGDTGPDFSAGVLVGGFAFSDREIERHPDWAVFGGGELVLPEIFVVRSNGSTWMTHVEGATIPSLTPELDQDLGWVKEVDHQNDPNYLELVSSALTEIDAGNMTKVVTARSLSLPANLNSAALLQRLRLRHPSCATFAIAHGSQVFLGASPETLVNVRGDRLKTAALAGSRPRHEHPGADARLRAELLANPKERNEHQIVIDDITNSLTTAGVHLDAPAPTGVMKLRRIQHLHTPISGNLPGNIDILDLIKALHPTPAVAGLPRQRAQDWIDENELMDRGWYAAPVGWMTPEGGGEFRVALRSALLTDKSLTLFAGGGIVDGAEPDRELAETATKFEALLGALDLTP

SEQ ID NO: 93142 - protein, 418 aa, unidentified
  source 1..418: note = Acidimicrobiia bacterium
  REGION 1..418: note = tr|A0A431IF11|A0A431IF11_9ACTN Isochorismate synthase OS=Acidimicrobiia bacterium OX=2080302; GN = EKK62_13800 PE=4 SV=1
MTEMDLVARTEPGQPVDELPPPGRAHVAFCSPRRSLRGSGEALRIDLPAPWPEHVDAVADTLAGIVHDGSGGAGRGPVAFGALPYDRDTPASLVVPAVIHGRTADGERWTTRIGDAAAGSDAATTSDVAASSEDGDEAPTPTDPTSVTISSVLSPREWAASVATAVDRIGRGELTKVVLARELSVRTDQALDAATLLRRFRAASPAAFAYSVDGFVGATPELLVSRIGDVVRAHPMAGTLPRTGDPDADSRRAGELLGSTKNRWEHQITIDAVHDTLLPWCSYLDAEPEPSVVAAGPVQHLATLVEGRLGQPEPSVLELVAALHPTPAVGGWPRIEALAVQAELERADRGRYAGPVGWVDAEGNGVFGVGIRGVQIAEDPTSARLFAGVGVVDGSDPWAELEETRSKAAAVLGALTRI

SEQ ID NO: 93143 - protein, 409 aa, unidentified
  source 1..409: note = Acidipropionibacterium acidipropionici
  REGION 1..409: note = tr|K7S3N3|K7S3N3_ACIA4 Isochorismate synthetase, enterochelin biosynthesis OS=Acidipropionibacterium acidipropionici (strain ATCC 4875 / DSM 20272 / JCM 6432 / NBRC12425 / NCIMB 8070) OX=1171373 GN=PACID_13900 PE
MPDLDVASLTGGVLPGSSALADLSGARWLAEVSALLPADAERPRVWIAPDADDAPCILGWGTAARFSGTSAGGVHTAWEQFRSWAAGADAEPVALGSFPFARDRAGDLVVPAVTVIRRARGRRTEVLSAPGEPMPRRVPRPHREPASLAELPQPGAERAWRTAVESAVAALDDDCRVQKVVLARTVELLAPHPIDQMAVATALAARFSGCWTYAHDGLIGATPELLVDLRGGRFRSRVLAGTRKPAWSEELLSDPKEQREHQLAVASVTQVLEADGVSPTVEGPFLLRLPNVTHLATDITARVGSRTDSARVVDALHPTAAVCGTPREDAYQIIERVEGLDRGQFSGPVGWMTADGSGQWGIGLRCGQFAPGSRRVTVYAGAGIMPSSDPAKEWLETGAKMEAFLSALR

SEQ ID NO: 93144 - protein, 414 aa, unidentified
  source 1..414: note = Acidipropionibacterium jensenii
  REGION 1..414: note = tr|A0A3S4UZ24|A0A3S4UZ24_9ACTN Isochorismate synthase dhbC OS=Acidipropionibacterium jensenii OX=1749; GN = dhbC PE=4 SV=1
MPSVIVNPGSSRLRARTVAIPDPGSLQKYLTARSSMCLLHGYEEIIGLGEIARFETDSPGAADVWWEEFCADIENETEMPGVRGTGPLAFGSFTFDGDRSTSPSVMIVPETVIGRRAGYSWLTQVSFDSVHADPPRIQAPPRQPTGLELSDGVVTEQGWAERAGQVREILGDDVQRVLLMRDLMARADDPIDPRWIVQRCSDLLPDSWTYLVQGAVGTTSTLLLRQIDGLITTRTLSHGQSAVSGSDPRLLEALSGTGPFAEEHGSAVRWSEEMLRPFCRSIQHSPFPGLIPEASDRMLVTDVTGAPLPETRSLTAVGAMHPAPFVSGLPPWKALEMLAEVEGVDRGRITGPVGWIDSQGDGEWVVDWRGAQVDATDPNLLHVFIGQPVGHDDDVSLLATALRKRISATFALMR

SEQ ID NO: 93145 - protein, 436 aa, unidentified
  source 1..436: note = Acidipropionibacterium virtanenii
  REGION 1..436: note = tr|A0A344UUZ9|A0A344UUZ9_9ACTN Isochorismate synthase EntC OS=Acidipropionibacterium virtanenii; OX = 2057246 GN=entC PE=4 SV=1
MTEPTPAPALPARTSRATAIESGIVPVPDLPPLISRDLSGSTGLADLDGSAWLVRVAGLLPAGIERPRVWVAPDADDAPCILGWGAAARFTGSSAGGVLTSWEAFRQWARHTDADPVALGSFPFAREQTGDLVVPAVTLIRRAKGRPTEVLSSPDAPMPHPAAGREALPAVLTEIPQPGAEDAWRTAVESAVAALDADPRMQKVVLARALELSASHPMDQMAVATALASRFTGCWTYAHDGLVGATPELLVDLRAGRLRSRVLAGTRKPAWSEELLSDPKEQREHELAVASVTQVLESDGVLPRVDGPFLLRLPNVTHLATDITAQAGGTGAAHFSAARIVDALHPTAAVCGTPREEAYRVIDRVEELDRGRFSGPVGWMTADGSGQWGIALRCGQFAPGSRNVKVFAGAGIMPSSDPAKEWLETGAKMEAFLHSL

SEQ ID NO: 93146 - protein, 427 aa, unidentified
  source 1..427: note = Acidithrix ferrooxidans
  REGION 1..427: note = tr|A0A0D8HKY5|A0A0D8HKY5_9ACTN Isochorismate synthase EntC OS=Acidithrix ferrooxidans OX=1280514; GN = entC PE=4 SV=1
MQNRKELPSRPIEEEGLIFANSCNLGESLNKDRVMGIFRDEIQNGSAIVFMRPGLMVLASGPYLTTQTLDPKSKIREITSNFKVDRPETASLIDIFGLIPFDPKTQPTYLYVPSFVINITEEQSRLAVIGSDQNDAANKLSALADSLSGKIIKPHEEACSGDCCAPSNLAFTVDDQSWLNQAISAIDRIRNGEFEKIVLSRRTTLNLKKPLNRMRSLSRLIERYPGALSFSYGDLIGATPELLIRREGDFFESHPLAGTASTGNESALLASYKDNHEHRVVTDHITSRLNECTARIDIPTTPSITNFGDICHLGTPIRGLLRDPMNTDSIDLLLKIHPTPAVAGIPQAAAVAFIQEIEDEPRHLYAGAIGYQNLSGDGEWHLTIRTVSIDGLEIEFQAGVGIVNESDPNEELREVQAKLTAMLPIVT

SEQ ID NO: 93147 - protein, 479 aa, unidentified
  source 1..479: note = Acidobacteria bacterium
  REGION 1..479: note = tr|A0A3M2C5M9|A0A3M2C5M9_9BACT Isochorismate synthase OS=Acidobacteria bacterium OX=1978231; GN = D6696_02480 PE=4 SV=1
MSALTSLAPAPAARPSVLDAAEIRAFVAGRLAAHAGRPATLMLSLPAPAVEPETLLRLIPGRYGFLWHPPAGTAFAGCGASHRIDLAGSARFDRLRRAAGGLFARLESVVHPAASPVPPRLFGGLAFAVGAAGDEPWRSFGDGCFTLPRLRYASDGRRATLSLTVRGEDELDRPGRRRWLELLDRAVAGLTAAAGGGIAAGDEPPGDVAAVARAVHPPPLRRWNEQVEAIRAAIADGRCEKIVAAHRSVVELARPVAPATVLRRLENGAQAATRFAFCRPDGTFLGATPERLILRRGRRIATEALAGSIASGNAHAAQLLASAKDRCEHQLVVEQIVRRLEPLCAALEVPPEPRIRALRDVLHLHTPITASLASPRHVLELVELLHPTPAVGGVPTDAALRWIARCEDVGRGWYAGPIGWFDARGDGDFAVALRTCLLRRDRAYLYAGAGIVADSDPALEYEETALKMRSLLAALGAGA

SEQ ID NO: 93148 - protein, 407 aa, Acinetobacter baumannii
  REGION 1..407: note = tr|A0A062SLZ1|A0A062SLZ1_ACIBA Isochorismate synthase family protein OS=Acinetobacter baumannii 25977_9; OX = 1310913 GN=J812_3673 PE=4 SV=1
MSVQHPYFIQRENFTESRITLAKEVLNCTDNAGFIFTTPEYIISSHQKLKDIEVTKDTQLKEWLNEARLQLQQAIADGYSDAKVMGGLPFSSSADVNLMLMQDAKVYQKALFSQTDINLDDLILKQADYLPSGEHYQQQVEYLVQQMRAQKLDKAVLARILQLEFEENLPVSDVFYNLAKHNPEGYNYAVARHPQSEGWFVGASPELLIAKQNNKIWSKPVAGTLARDDDPIVDQNNARALLASQKDQHEHALVIEMIADELTPFCKQLHVPKQPSLIRTKRLWHLASHITGELKQADTHVFDLIERLHPTPAICGEPSSVAKNLIQQLEPFNRELFAGTMGWTDAEGNGEWSVTVRCARIYQNIARLFAGAGIVEASRPQAEHAETAAKFRTVLDGLHISPDQLPR

SEQ ID NO: 93149 - protein, 395 aa, Acinetobacter baylyi
  REGION 1..395: note = tr|Q6F8U5|Q6F8U5_ACIAD Isochorismate synthetase; OS = Acinetobacter baylyi (strain ATCC 33305 / BD413 / ADP1); OX = 62977 GN=entC PE=4 SV=1
MYYKGNGFMNDMNLSIDHAIELNINLESSCFLTKDYRLLASDLAEVVKLAACDYEKLSQTITDSFQKLKKDPNANPILVGAIPFDTTQASSLNIYRNHRKQRQLVISSKITHSPLSISNQKPLIKQKDFAHAIDIAIDQFRCDQLEKVVLSQAVDFELSQSQNPFDLVDTLAKENPHAFSFAIPVEDNAYLLGASPELLISKNDLTVRSNPLAGSRPLSEDENINQSRIHELYASEKDLNEHQIVVDSVLENLKPFCQKLKVLEKPEILKTATMLHLSTVFDGQLKKQSDNALQLALALHPTPAICGSPTEPAKQFILEHEGYDRHYFAGLVGWMDAQGNGEWAVTIRCGLLNDKKIRLYAGAGIVMGSQAELEWSETEVKMQTLLKTLSATFHS

SEQ ID NO: 93150 - protein, 408 aa, Acinetobacter bouvetii
  REGION 1..408: note = tr|A0A4Q7ANW7|A0A4Q7ANW7_9GAMM Isochorismate synthase OS=Acinetobacter bouvetii OX=202951; GN = EXE25_15675 PE=4 SV=1
MLAVEPSVFKNMIGITRENLIEAEVAGFVFATPTGTISSKKLLENIHFERQPELSFVEQQQKWLKHAQHKLQQRIQATGNSELILVGSLPFDHRDLPEMSIAEAKNTYVTDGLNFVPPFERLSQVQATFVPPQADYVDGVAKLVELMKTTELEKAVLARAIDLQCEQKIPVVDLFYQLFKNNPEGYTFALAQDPRKSGWFMGASPELLVAKQNQYVFSNPVAGTLARSADALEDQAQAQRLLASAKDRHEHAVVIEAIADLLSPLCDKLSIPKSPSLIKTQTVWHLATQIQGTLKDPEMHVFDLASILHPTPAVCGQPAPLARQLISDLEPFNRNLFAGTMGWSDAHGNGAWAVNVRCGRIFEYSARLYAGAGIVEASQPASELNETIAKFKTMLNALGLNADQLTYQ

SEQ ID NO: 93151 - protein, 389 aa, Acinetobacter calcoaceticus
  REGION 1..389: note = tr|A0A1C4HKX9|A0A1C4HKX9_ACICA Isochorismate synthetase OS=Acinetobacter calcoaceticus OX=471 GN=entC; PE = 4 SV=1
MMQTQISVEQNLDHIGQKKFSCFSTKNYYLEVSEFIKTVNTPAANTALFNDEIAKCFEEIKKQGHQNPVLIGAIPFDITKKSSLNFYADHKKITQASSTINSLKNRNNIEIINKSLLIQRQKFKGTVQLALDAFEKKKVEKVVLSQAVEYEFNRHQEPENLLAALLKQNPNAYNFVIPVEHNNYILGASPELLLSKQDRIVTSNPLAGSRPKSQISEKNFVSQQELNHSEKDQHEHRIVVENIIRNLATHCVELKVSEFPDILETSTMLHLSSEFQGVLKQQAPDALNLALELHPTPAVCGSPTHVAKQFILDHEGYDRHYYTGLVGWMDAEGNGEWVVTIRCGLLSENKMRLYAGAGIVEGSDAEAEWLETEAKMQTMLNILNTKIAV

SEQ ID NO: 93152 - protein, 410 aa, unidentified
  source 1..410: note = Acinetobacter colistiniresistens
  REGION 1..410: note = tr|A0A558F7S4|A0A558F7S4_9GAMM Isochorismate synthase OS=Acinetobacter colistiniresistens OX=280145; GN = FPV60_10390 PE=4 SV=1
MSIQHPYFIQKENYTESRVALAHEILQCHHDAGFYFTTPDYVLKSQHKLQDIEIPRGSHLSDWLKQARAQLDQAIRTGHHQAMILGGIPFSNANDVNLMLMDDVRFYQKLIYTQPFGARPEHALRHARFIPSGQQYQTQVAELVDKMQRGQLNKAVLARVLELELADEIDVSQLFYQLSQDNPEGYNYAVARHSAQEGWFVGASPELLVGKQGTNVSSKPVAGTLARDIDPIQDQHNAQQLLASAKDQHEHAVVIEMIADQLSPFCKTLHIPKQPSLIRTKRLWHLATRIDGELKNKDIHIFDLVEKLHPTPAICGQPTAVAKTLIEDLEPFNRELFAGTMGWADAQGNGEWSVTVRCARIQQHIARLFAGAGIVAASDPSAEHAETAAKFRTVLDGLGFSSAQVMEKVK

SEQ ID NO: 93153 - protein, 389 aa, Acinetobacter haemolyticus
  REGION 1..389: note = tr|D4XRW5|D4XRW5_ACIHA Isochorismate synthase; OS = Acinetobacter haemolyticus ATCC 19194 OX=707232 GN=amoA; PE = 4 SV=1
MMQTTTSAEQNLEHNDQHKFSCFSTKNYHLTVKDFVKTINTPAANITLFNDEIAKCFDEMKKQGSRNPILIGAIPFDITKKSSLNFYADYQKKPQKTSDFHPLRDRDQVEVVNKSLLIQRQKFEGAVQLALNAFEAKKVEKVVLSQAVEYEFDHQQKPENLLSALLKQNPNAYNFVIPVEHNHYILGASPELLLSKQDRIVSSNPLAGSRPKSNISEKNLCSKQELHHSEKDQNEHRIVVENILKNLVSYCVELKVSEFPDILETSTMLHLSSEFQGVLKRQAPNALNLALELHPTPAVCGSPTDVAKQFILDHEGYDRHYYTGLVGWMDADGNGEWVVTIRCGLLSENKMRVYAGAGIVKGSDAEEEWFETEAKMQTMLNIFNANSTV

SEQ ID NO: 93154 - protein, 412 aa, unidentified
  source 1..412: note = Acinetobacter lactucae
  REGION 1..412: note = tr|A0A429IYX4|A0A429IYX4_9GAMM Isochorismate synthase OS=Acinetobacter lactucae OX=1785128; GN = EA763_12415 PE=4 SV=1
MSAQHPYFIQRENFTESRVALAQEILNCGNDAGFIFTTPEYTINSHQKLRDIQVTKNSLLKDWLDEARAQLELAINDGYKDVKIMGGLPFCSTADVNLMLMQNAKIYQKVLYAQSDIDFGSLSLKKADYFPLGEHYQQQVEYLVQQMQAKKLDKAVLARILQLEFEQNISVSDLFYNLAKHNPEGYNYAVARHPQSEGWFVGASPELLIAKQNTKIWSKPVAGTLARDDDPTLDQNNARALLASQKDQHEHALVIEMIADELTPFCKQLKVPKQPSLIRTKRLWHLASHITGELKKADTHVFDLIERLHPTPAICGEPSPIAKELIQQLEPFNRELFAGTMGWADEQGNGEWSVTVRCARIYQNIARLFAGAGIVEASRPQAEHAETAAKFRTVLDGFQISPNQMPIQGPNT

SEQ ID NO: 93155 - protein, 408 aa, unidentified
  source 1..408: note = Acinetobacter piscicola
  REGION 1..408: note = tr|A0A4Q4GZA9|A0A4Q4GZA9_9GAMM Isochorismate synthase OS=Acinetobacter piscicola OX=2006115; GN = EWP19_07230 PE=4 SV=1
MLPVEPSVFKNMIGITKEDLIETDVAGFVFATPTGAISSQKLLENIQFDRNTALSFEQQQQAWLQHAQQKLQQKIQQTGNAELILVGSLPFDHRDLPEMSIAEAKNSYVSDGLAHLAASKGHSNVQATLVPPQVDYVNGVAKLVELMKKTDLEKAVLARAIDLNSTHKFSVVELFYRLFHNNPEGYTFALAQDPKKSGWFMGASPELLVAKQNQYVFSNPVAGTLARSADPHEDQAQAQRLLTSTKDQHEHAVVIEAIADQLSPLCQSLTIPKTPSLIKTQTVWHLATQIKGTLKDPEMHVFDLISILHPTPAVCGQPAPLARQLISELEPFQRNLFAGTMGWSDVQGNGAWAVNVRCGRIFEHSARLYAGAGIVEASQPTSELNETIAKFNTMLNGLGLNADQLSYQ

SEQ ID NO: 93156 - protein, 412 aa, Acinetobacter pittii
  REGION 1..412: note = tr|A0A4S1DIS2|A0A4S1DIS2_ACIPI Isochorismate synthase OS=Acinetobacter pittii OX=48296 GN=YA64_011075; PE = 4 SV=1
MSVQHPYFIQRENFTESRITLAKEVLNCTDNAGFIFTTPEYIISSHQKLKDIEFTKDTQLKEWLNEARLQLQQAIAEGYSDAKVMGGLPFSSSADVNLMLMQDAKVYQKALFSQTDINLDNLILKQADYLPSGEHYKQQVEYLVQQMRAQKLDKAVLARILQLEFEENLPISDVFYNLAKHNPEGHNYAVARYPQSEGWFVGASPELLIAKQNTRIWSKPVAGTLARDDDPTLDQNNARALLASQKDQHEHALVIEMIADELTPFCKQLQVPKQPSLIRTKRLWHLASHINGELKKADTHVFDLIERLHPTPAICGEPSPIAKELIQQLEPFNRELFAGTMGWADEQGNGEWSVTVRCARIYQNIARLFAGAGIVEASHPQAEHAETAAKFRTVLDGFQISPNQLPIQGPNT

SEQ ID NO: 93157 - protein, 407 aa, unidentified
  source 1..407: note = Acinetobacter seifertii
  REGION 1..407: note = tr|A0A5E9PMD0|A0A5E9PMD0_9GAMM Isochorismate synthase OS=Acinetobacter seifertii OX=1530123; GN = E2R16_02665 PE=4 SV=1
MSVQHPYFIQRENFTESRITLAKEVLNCTDNAGFIFTTPEYIISSHQKLKDIEVTKDTQLKEWLNEARLQLQQAIADGYSDAKVMGGLPFSSSADVNLMLMQDAKVYQKALFSQTDINLDDLILKQADYLPSGEHYQQQVEYLVQQMQAQKLDKAVLARILQLEFEENLPISDVFYNLAKHNPEGYNYAVARYPQSEGWFVGASPELLIAKQNNKIWSKPVAGTLARDDDPIIDQNNARALLASQKDQHEHALVIEMIADELTPFCKQLHVPKQPSLIRTKRLWHLASHITGELKQADTHVFDLIERLHPTPAICGEPSSVAKNLIQQLEPFNRELFAGTMGWADAEGNGEWSVTVRCARIYQNIARLFAGAGIVEASRPQAEHAETAAKFRTVLDGLHISPDQLPR

SEQ ID NO: 93158 - protein, 407 aa, Acinetobacter sp.
  REGION 1..407: note = tr|A0A010JX71|A0A010JX71_9GAMM Isochorismate synthase family protein OS=Acinetobacter sp. 1566109; OX = 1310683 GN=J582_2025 PE=4 SV=1
MSVQHPYFIQRENFTESRITLAKEVLNCTDNAGFIFTTPEYIISSHQKLKDIEVTKDTQLKEWLNEARLQLQQAIADGYSDAKVMGGLPFSSSADVNLMLMQDAKVYQKALFSQTDINLDDLILKQADYLPSGEHYQQQVEYLVQQMRAQKLDKAVLARILQLEFEENLPVSDVFYNLAKHNPEGYNYAVARHPQSEGWFVGASPELLIAKQNNKIWSKPVAGTLARDDDPIVDQNNARALLTSQKDQHEHALVIEMIADELTPFCKQLHVPKQPSLIRTKRLWHLASHITGELKQADTHVFDLIERLHPTPAICGEPSSVAKNLIQQLEPFNRELFAGTMGWADAEGNGEWSVTVRCARIYQNIARLFAGAGIVEASRPQAEHAETAAKFRTVLDGLHISPDQLPR

SEQ ID NO: 93159 - protein, 406 aa, unidentified
  source 1..406: note = Actinoalloteichus hoggarensis
  REGION 1..406: note = tr|A0A221VXB6|A0A221VXB6_9PSEU Isochorismate synthase EntC OS=Actinoalloteichus hoggarensis OX=1470176; GN = entC PE=4 SV=1
MGRLQARTVAADSDADLLALLPDPEPVFSWVHGGEGLVGWGEAARIEVKGADRFAEAERWWADLVAAADVEDAVGLPGTGLVAFVSMSFADEPGSSVVIVPKVVVGRRDGVTWRTELRDDDEPFAPAVQPVRRVRVTRYSEGRLSVTDYRKAVAGAVERMRAGELAKVVLAHDLIAETDSPLDQRFLLRNLADRYPSCWVFAVDGLIGATPEMLLRKTGETVESRVLAGTAWPGAGESAESRLSSAKNRSEHEFAIRSLADTLRPYCTELHVPETPSVLRLPNVAHLASDVTGRLDPDTTAGPGALLRLGHAVHPTAAVGGTPRTEAVALIAELEAMDRGRYAGPVGWIDADGDGELGIALRCAELRGSLVRLFAGCGIVSGSDPDAEVREAAAKMLPIRDALEAT

SEQ ID NO: 93160 - protein, 373 aa, Actinoalloteichus hymeniacidonis
  REGION 1..373: note = tr|A0A1D8BRD9|A0A1D8BRD9_9PSEU Isochorismate synthase OS=Actinoalloteichus hymeniacidonis OX=340345; GN = TL08_02545 PE=4 SV=1
MVGWGEAVRLDLGGADRFAEAEQWWRDLVANTEVADDIGLPGTGLVAFVSMAFADQPGASVLVVPKVVVGKRDGVVWRTELYRAGDEPEGSIVEPVRRVRVTRYSEGHLPVTGYRKAVTEAVRRMRAGELEKVVLAHDLIAETDTALDQRFLLRNLAARYPNCWTFAVDGLVGATPELLLRKTGATVQSRVLAGTAWPGSGGADSAGSSLDSAKNLSEHGFAVLSLADTLRPFCTTLDVPTQPRVLQLPNVTHLASDVTGRLDPAEATGPGALLRLIHAVHPTAAVGGTPTPDAVAVIAELEAMDRGRYSGPVGWIDADGDGELGIALRCAQVEGSRVRLFAGCGIVVDSDPDAEVREAAAKMLPIRDALETP

SEQ ID NO: 93161 - protein, 388 aa, Actinoalloteichus sp.
  REGION 1..388: note = tr|A0A1L7F128|A0A1L7F128_9PSEU Isochorismate synthase OS=Actinoalloteichus sp. GBA129-24 OX=1612551; GN = UA75_02505 PE=4 SV=1
MLPNPEPVFSWVHGGEGLVGWGEAARIEVKGADRFAAAERWWSELVATAEVEDTIGRPGTGLVAFASMSFADEPGSSVLIVPRVVVGRRDGATWRTELHEGDDAPITPIVQPVRRVRVTRYSEGRLSVTDYRKAVARAVERMRAGELAKVVLAHDLVAETDSPLDQRFLLQNLAARYPSCWAFAVDGLVGATPELLLRKTGETVESRVLAGTAWPGSGESAESRLDSAKNRSEHEFAVRSLAETLRPYCTELDVPQTPSVLRLPNVAHLASEVSGRLDPAKTTGPGALLRLGHAVHPTAAVGGTPRTEAVALIAELEAMDRGRYAGPVGWIDARGDGELGIALRCAELRGSLVRLFAGCGIVSDSDPDAEVREAAAKMLPIRDALESA

SEQ ID NO: 93162 - protein, 427 aa, Actinobacillus delphinicola
  REGION 1..427: note = tr|A0A448TV37|A0A448TV37_9PAST Isochorismate synthase MenF OS=Actinobacillus delphinicola OX=51161; GN = menF PE=3 SV=1
MLSIIKQAILSKLEKLDFNSAPNIAVIRLTQMNFSLPLLNWLKAQLRYPQFYLHYRDKTQHCVALGSIKTFTDSQQAEVFCQKEDLPLVGGRQFTGETFFFLPRLLLEQKENSLSVSLFVDVRANRESEIQQTEQILQNFTQIAQREQLPKIVKELASEADEATWCNWVEQACHAIQEKQFTKVVLANAKSFQTESVLNPYDFLSESEAYNQHCYHFLFAKDNTTVFLGSTPERLFLRQNSKLFTEALAGTAFVSEDEEETQRQADWLFNDEKNRHENQLVVENIQQSLQNVVKTFEVGERQIKRLRKVQHLQRPICGELIEGQADASCLQKIHPTAAVAGLPKSAAMQFINQIEGQAREWYAGTLGVMTKSQSEFCVTIRSANIRNDIIQVFAGAGIVEGSIPAHEWREIERKALGLVSLLEMKKE

SEQ ID NO: 93163 - protein, 139 aa, Actinobacillus equuli
  REGION 1..139: note = tr|A0A448QMU8|A0A448QMU8_ACTEU Menaquinone-specific isochorismate synthase OS=Actinobacillus equuli OX=718; GN = menF_1 PE=4 SV=1
MNLKDCITEIAVSQAEIKRLHNVQHLRRKIAAQLKPNMSDADCLARIHPTAAVAGLPRQAAKQFIAEYEQFTRCWYAGTFGYLQPNEAEFCVALRSAQIEQNCITLYAGAGIVEESEPQSEWQEIERKSLALAKLLKVD

SEQ ID NO: 93164 - protein, 424 aa, Actinobacillus indolicus
  REGION 1..424: note = tr|A0A4P7CH08|A0A4P7CH08_9PAST Isochorismate synthase MenF OS=Actinobacillus indolicus OX=51049 GN=menF; PE = 3 SV=1
MSVFSQLKQQLYQQLQQKPVVQGLVQLQAEIAIDLENQQLLAWLKAQPLFPHYYWQNRDTEQTIVAVGAVQTFEHLDEVEQFSKQSDLMVVGGMEFEGQCHFVLPRLLLVKNEKKITAWLNLDCRHFETEQKECIALLAQFEQTAELHPIENRLLSTEVACDFSRWQQNIELAIEQIQRQQMNKVVLANATTKTFAHHISPYDLLFASQQKNLGCYHFLWSEKQGEAFIGSTPERLYLRQQRQFFTEALAGTVAVTDDPVQTEQNALWLLNDQKNIYENWLVVDDICSHLADCATDIQVSDAEIKRLHNVQHLRRKIQTQLTEQVSDADCLARIHPTAAVAGLPRPKAKQFIQQQECFERGWYAGALGYFTPEQAEFCVMLRSALIQANQITFYAGAGIVEKSDPQSEWQEIDRKAQAMAGLMG

SEQ ID NO: 93165 - protein, 426 aa, Actinobacillus lignieresii
  REGION 1..426: note = tr|A0A380TQH6|A0A380TQH6_ACTLI Isochorismate synthase MenF OS=Actinobacillus lignieresii OX=720 GN=menF; PE = 3 SV=1
MSIFNQLKQQLSKQLIESGTHFGLVEYQAEAALSEENIALLSWLKAQNHYPHFFWQARETDQTIASIGAVRSFFSVDEAQQFVKQTQFGLVGGVRFEGACQFILPRLLLVKNQQNLTAYFYLNEAELAQQAVIFERFFANFCQTLPLELTENNLLAQTSVYDFDGWQQNIERAISHIQQKDFNKVVLANAKTLQFENELSAYDLLAASQTTNLGCYHFIWAENVESVFVGSSPERLYHRKGNQFHTEALAGTAPVTESMVQTELNAQWLLTDPKNIYENQLVVDDIQAQLTDCVTELQISQAEIKRLHNVQHLRRKISAVLKPEMSDADCLARMHPTAAVAGLPRQAAKQFIAEYEQFTRCWYASTLGYLQPDEAEFCVALRSAQIERNRITLYAGAGIVEESEPQSEWQEIERKSLALAKLLKVD

SEQ ID NO: 93166 - protein, 432 aa, Actinobacillus minor
  REGION 1..432: note = tr|C5RZV2|C5RZV2_9PAST Isochorismate synthase MenF; OS = Actinobacillus minor NM305 OX=637911 GN=menF PE=3 SV=1
MSIFSQLKQQLSEQLAKQASQQGLIELQASVCLSDENVAFLAGLNAQKNIYPHFFLKNRDRDQTITALGAVKTFQQLETAQAFIQQTHFSLIGGLQFEGECCFVLPRLKLVKEQQNLTAYFYLDLSAETSQAVNFDDYFAPFLAEQNELAPPSRPFANKLIDRKTACDFEGWQANINKAINEIQAQHFSKVVLANAICLTFDKPISAYELLEQSQKINLGCYHFLWAENSETAFVGSTPERLYLRQARNLYTEALAGTVAVTEDLAQTEQNAQWLLNDTKNVYENQLVVDDITRHLEDCVEQIEIGKAEIKRLHNVQHLRRKIQAVLKPTISDSECLIRIHPTAAVAGLPRAKAKQFIAENEPFTRGWYAGTLGILGEDEAEFCVTLRSAQIKQNQVTLYAGAGIVQDSEPLSEWQEIERKSQALAKLLSYT

SEQ ID NO: 93167 - protein, 426 aa, Actinobacillus pleuropneumoniae
  REGION 1..426: note = tr|A0A223MBB9|A0A223MBB9_ACTPL Isochorismate synthase MenF OS=Actinobacillus pleuropneumoniae OX=715; GN = menF PE=3 SV=1
MSIFNQLKQQLSKQLIESGTHFGLMEYQAEVALSEENIALLSWLKAQNHYPHFFWQARETDQTIASIGAVRSFFSVDEAQQFVKQTQFGLVGGVRFEGGCQFILPRLLLVKNQQNLTAYFYLNEAELAQQAVIFERFFANFCQTLPLELTENNLLAQTSVYDFDGWQQNIERAISHIQQKDFNKVVLANAKTLQFENELSAYDLLAASQTTNLGCYHFIWAENVESAFVGSSPERLYHRKGNQFHTEALAGTAPVTESMVQTELNAQWLLTDPKNIYENQLVVDDIQAQLTDCVTELQISQAEIKRLHNVQHLRRKISAVLKPEMSDADCLARMHPTAAVAGLPRQAAKQFIAEYEQFTRCWYAGTLGYLQPDEAEFCVALRSAQIERNRITLYAGAGIVEESEPQSEWQEIERKSLALAKLLKVD

SEQ ID NO: 93168 - protein, 423 aa, Actinobacillus porcinus
  REGION 1..423: note = tr|A0A4V0IIM0|A0A4V0IIM0_9PAST Isochorismate synthase MenF OS=Actinobacillus porcinus OX=51048 GN=menF; PE = 3 SV=1
MMFELLAEKVKSHQIDTQSPMITAFRFEMAEFGALLAWLKAQHLFPQYYLNFRDSDNKIAALGKVRSFGDEISAQQFIEQTQQPLIGGLTFDKKGHFWLPRLLIEQQKHQVVISVFMDNQADLAQEKQQALNVIQTLTHFAELEPLNSQARLVSQKANQEVWCHWVEQALRAIEQGELNKVVLANESLFESAQPINAKDFLAESEKQNTGCYHFLYAETPESTFVGSTPERLFERSGVQVKTEALAGTALMSDDVQQNQAQADWLLHDQKNDDENWLVVKDICDNLQEFVSHIQVGDVELKQLRRVQHLRRCIQAELKPSFADAACLHAIHPTAAVSGLPQQNALAFLQKTENFDRTWYAGTLGMMTQSHGEFCVTIRCAFIEQNNIRIFAGAGIVAGSIPLLEWQEIERKASGLVTLLGTGK

SEQ ID NO: 93169 - protein, 436 aa, unidentified
  source 1..436: note = Actinobacillus porcitonsillarum
  REGION 1..436: note = tr|A0A2U8FJ76|A0A2U8FJ76_9PAST Isochorismate synthase MenF OS=Actinobacillus porcitonsillarum OX=189834; GN = menF PE=3 SV=1
MSIFSQLKQQLSEQFAKQVSLQGLIEIQASVCVSDENVAFLAGLNAQKNIYPHFFLKNRDRDQTVITLGAVKTFQQLETAQAFIQQTGFPLIGGLQFEGECCFVLPRLKLVKEQQNLTAYFYLDLSTETSQAVNFDDYFATFEAQQNDLAPLSNSSFAHKPLANKLIDRKTACDFEGWQTNINKAINEIQAQNFSKVVLANAICLTFDKPISAYELLEQSQKINLGCYHFLWAENSETVFVGSTPERLYLRQARNLYTEALAGTVAVTEDLDQTEQNAQWLLNDTKNVYENQLVVDDITRHLEDCVEHIEIGKAEIKRLHNVQHLRRKIQAVLKPTISDSECLIRIHPTAAVAGLPRAKAKQFIAENEPFTRGWYAGTLGIWGENEAEFCVTLRSAQIKQNQVTLYAGAGIVQDSEPLSEWQEIERKSQALAKLLK

SEQ ID NO: 93170 - protein, 424 aa, Actinobacillus seminis
  REGION 1..424: note = tr|A0A263HEX4|A0A263HEX4_9PAST Isochorismate synthase MenF OS=Actinobacillus seminis OX=722 GN=menF; PE = 3 SV=1
MDSFHFLKKQLIEKINTYQPQHEEITVLQSQSAVEVNLLSWLKAQNVYPQFYLKRRDEVQTFAAVGKVRSFSDTNLAQQFIETHDFTLIGGLTFDGETLLYLPRLLLLQEKAQLSAQLFIDNRVDWATEKTQLLSLLENLEKTTALLPIQQSIYQYSPTASQAQWCQWVENALQHIQQGHAGKIVLANETLFHTEQPLCAKEVLAESEQYNVGCYHFLLARDAECSFIGSTPERLYQRDGDQLQTEALAGTAFMSEDEQLNRQQATWLLHDPKNIYENSLVVEDIQQNLRPFSTQIEVSELGIKQLRQVQHLRRPISAKLAENCGDSVCLQAIHPTAAVAGLPRQAAKQFLQQTETFQRSWYAGTLGFMRQQQAEFCVAIRSAFIEQNKIRVFAGAGIVEGSIPLLEWQEIERKALGLISLLQE

SEQ ID NO: 93171 - protein, 426 aa, Actinobacillus succinogenes
  REGION 1..426: note = tr|A6VMF7|A6VMF7_ACTSZ Isochorismate synthase MenF; OS = Actinobacillus succinogenes (strain ATCC 55618 / DSM 22257 / 130Z) OX=339671 GN=menF PE=3 SV=1
MERLQHALSEQIKTHSFTPQSQTITAFRAETAAVGSLLSWLKGQVMFPQYYLNFRDNSRCIAAIGKVRSFSDEISAQQFVRRTDLLVAGGLTFDKRATFWLPRMVLEQKNNKLYATLYTDGEQPPQNERQAALDAVKTLSNYTALLPVRQTLRLESQKADENRWCEWVQKAVNAIERGDFTKVVLANESCFIASNPIDSKDFLAESEKQNTGCYHFLYAENPQQVFVGSTPERLFARQNNFIRTEALAGTAAMSEDPIQNQREAAWLLSDPKNDNENLLVVKDICDNLADYVRRTDVGEVGLKQLRRVQHLRRRIRAELKPPFSDAACLRAIHPTAAVSGLPQKNALDFLKNTENFDRTWYAGTLGVMTKEHSEFCVTIRSAFIESNKIRVFAGAGIVAGSVPLLEWQEIERKASGLLTLLTHRGE

SEQ ID NO: 93172 - protein, 426 aa, Actinobacillus suis
  REGION 1..426: note = tr|K0FVI1|K0FVI1_ACTSU Isochorismate synthase MenF; OS = Actinobacillus suis H91-0380 OX=696748 GN=menF PE=3 SV=1
MSIFNQLKQQLSEQPTENKTAFGLIEYQASVPFSEENVALLNWLKAQEHYPHFFWQARDTDQTIASIGTAKSFSSLEEAQQFVKQTQLGLVGGIQFEGDCQFILPRLQLVKNQQNLTAYFYLNEAELAQQEVIFEQFFANFIQTLPLELTENNLLSLTSVYDFDGWQQNIERAISHIQQHNFNKVVLANAKTLQFEHELSAYDLLAASQTTNLGCYHFIWAENAKSAFVGSSPERLYHRKGPQFNTEALAGTAPVTESAIQTELNAEWLLTDPKNIYENQLVVDDIQIHLEDCTTEITVSQAEIKRLHNVQHLRRKISAQLKPNMSDADCLARIHPTAAVAGLPRQAAKQFIAEYEQFSRCWYAGTFGYLQPDEAEFCVALRSAQIEQNCITLYAGAGIVEESEPQSEWQEIERKSLALAKLLKVD

SEQ ID NO: 93173 - protein, 426 aa, Actinobacillus ureae
  REGION 1..426: note = tr|E8KJD4|E8KJD4_9PAST Isochorismate synthase MenF; OS = Actinobacillus ureae ATCC 25976 OX=887324 GN=menF PE=3; SV = 1
MSIFNQLKQQLSKQPTENKTHFGLIEYQASVPFSEENVALLNWLKAQEHYPHFFWQARDTDQTIASIGTAKSFSSLEEAQQFVKQTQLGLVGGIQFEGDCQFILPRLQLVKNQQNLTAYFYLNEAELAQQAVIFEQFFANFTQTLPLELTENNLLSQTSVYDFDGWRQNIERAISHIQQHKFNKVVLANAKTLQFEHELSAYDLLAASQTTNLGCYHFIWAGNAKSAFVGSSPERLYHRKAAQFNTEALAGTAPVTESAIQTELNAEWLLTDPKNIYENQLVVDDIQIHLEDCTTEITVSQAEIKRLRNVQHLRRKISAQLKPNMSDADCLARIHPTAAVAGLPRQAAKQFIAEYEQFSRCWYAGTLGYLQPDEAEFCVALRSAQIEQNCITLYAGAGIVEESEPQSEWQEIERKSLALAKLLKVD

SEQ ID NO: 93174 - protein, 441 aa, unidentified
  source 1..441: note = Actinobacteria bacterium
  REGION 1..441: note = tr|A0A3N5LIK5|A0A3N5LIK5_9ACTN Isochorismate synthase OS=Actinobacteria bacterium OX=1883427; GN = EHM57_02310 PE=4 SV=1
MAPVSLIPQSAIDRLRALPRGDRFRFLDTPADIDPLGLVRSGAHLFGQAFFVATPGGARFGGLGTAWKATASGGDRLRALRDRIRDLDLPAGERVMVGFSFSDAGPLAEHWGGFGAADAVLPIVAAEHGPEGTILRLALPPGSDPEALANLLQSLRPAPDPLPLDLGDHVIESHPHVSEWRHRVAEAVAAIRAGALEKVVLSRSVVVRSTVPVGGFDVLHQLAGAYPGCYAFGWGVGDAVFIGASPELLLEMRGDRFLSNPLAGSAARGEGELEDRALGESLLASEKDRVEHSLVVDDVAARLRPHAMVMEVPVAPTLRRVATVQHLSTEISGTFHPGTHLLDVVADMHPTPAVGGTPRLEAAGIIDKAEDIDRGWYTGGIGWVGPGSDGLIALALRCGLVRGATAHLYAGAGIVADSDPDQELLETRLKLRPLLELLASG

SEQ ID NO: 93175 - protein, 409 aa, unidentified
  source 1..409: note = Unknown
  REGION 1..409: note = tr|J9DTU3|J9DTU3_9ACTN Isochorismate synthase; OS = actinobacterium SCGC AAA027-L06 OX=913338; GN = A27L6_001100000790 PE=4 SV=1
MAILITTENLGENPVLTSVANELDLTTTWIRSGDGLMGFGEYKKIELTGEDRFEKAKSWWQIQLSEFKIQNNVHGSGTGPILFGSFSFDPNEKSILVIPKIILGKKAGKSWVTWIGDNTQPNFSTLSKSLPSGEITWSDGALSESQWKDQVGFAVDSIKQNKLEKVVLARDQVAASTVAINTRGLLQRLEIEYPSTWLFLVDGLVGATPELLVRLSKSLVTSRVLAGTIRKTGNEDRDLALAASLAKSSKDLEEHEYAVRSVADALAPFCSSTNVPESPFVLHLSNVMHLATDVTGVLNDSAKQADIFTLIQQLHPSAAVCGTPTNAAKKFIIDFEKMNRERYAGPVGWIDANGDGEIAIALRCGQLSRDNKSIRIFAGCGVVAGSDPANELAESQAKLMPMRTALETL

SEQ ID NO: 93176 - protein, 398 aa, unidentified
  source 1..398: note = Actinokineospora spheciospongiae
  REGION 1..398: note = tr|W7IU36|W7IU36_9PSEU Isochorismate synthase of siderophore biosynthesis OS=Actinokineospora spheciospongiae OX=909613 GN=UO65_0788 PE=4 SV=1
MSAAALVRPRPVHRAADLLSAYLPGSFYYSSARGSLLADGVHAPVDAPHGTRAAAAAAALTAAAVAGVEEPVVVGAIGFRPDGPSSLVVPALVRRAGAPGGDGPTGAARVPAWTITPRPEPAAYTAAVRRALDLIDDGDLDKVVLGRCLDLLADTPVAVPALLARLVRADPAAHAFAVDVSAPGDPAPRTLLGASPELLVSRHGTEVVANPLAGSLPRVADEDENRRRRAALLASAKDRAEHAHVAAGVAEVLGRSCVDLDVPAEPSVIGTPTMWHLSTRITGRVADPADPGSSALALAEALHPTPAVCGVPVVRAREAIADLEPLDRGHFTGLVGWTDLNGDGEWVVTIRCAEVCDRSVRLFAGAGVVAGSDPAAELAETGAKFRTLLRALGAEDPR

SEQ ID NO: 93177 - protein, 413 aa, Actinomadura chibensis
  REGION 1..413: note = tr|A0A5D0NC56|A0A5D0NC56_9ACTN Isochorismate synthase OS=Actinomadura chibensis OX=392828; GN = FXF69_34530 PE=4 SV=1
MKLAVTAPDRLSVRTVPVPDPGDLVARLPHPTALAWIRDGQGIVGWGEAARLTLPGGDGGDRFTDAARLLTRLFGAADVDDPVDLPGTGPVAFGSFGFDPKSPDSVLIVPRRVLGRRDGAAWLTTIGDDTEPLTLTAPPAAPTGLTWNQGALSEQAWKDAVAAAVARIRDGRLGKVVLARDVTARAAAPIDARVLLRRLTGRFPACYAFSCAGLVGATPELLIRRTGGDIESLVLAGTTARGTGPADDRARAARLFASAKDREEHRYAADMVRDALTPLCAELTVPDQPELLTLPNLTHLASPVRGRLAADRSVLDVVAALHPTPAVAGTPTGTALDLIRELEGMDRGRYAGPVGWVDARGDGEWGIALRCAEIDGTRARLFAGCGIVADSDPDAELAEARTKLRPMQYALHG

SEQ ID NO: 93178 - protein, 358 aa, unidentified
  source 1..358: note = Actinomadura parvosata
  REGION 1..358: note = tr|A0A2P9ITU9|A0A2P9ITU9_9ACTN Menaquinone-specific isochorismate synthase OS=Actinomadura parvosata subsp. kistnae OX=1955414 GN=KIS93_10892 PE=4 SV=1
MAVPPGPGRFAWARQWLATVLGDAQVHDDVRTPGSGAVAFGSFTFDEDSHGSVLVVPRAVLARRDGHAWLTTVGEAPLESFTPVRDPGRISYGDGSLTAPEWEHVVARAARRIREGELEKVVLARDLVATAERPIDVRLLLSRLAARYPECYTFSVAGLVGATPELLIRRTGQEIESLVLAGTTARGTGPADDLARGAALFASAKDRHEHECAIASVRHTLAPLCSSLTTPDEPELLVLPNVQHLASHVTGRLADGASVLDVVAAMHPTAAVGGTPTKTAIQVIRELEGMDRAGYAGPVGWIDANGDGEWGIALRSGQVQGRRARLFAGGGIMGDSDPAAELAEAQAKFRVMQYALEG

SEQ ID NO: 93179 - protein, 389 aa, Actinomadura sp.
  REGION 1..389: note = tr|A0A4R4L9Q8|A0A4R4L9Q8_9ACTN Isochorismate synthase OS=Actinomadura sp. KC216 OX=2530370; GN = E1264_39120 PE=4 SV=1
MTILTEPHADLLSAYLPGDSFFFRSPGHTLLARGTAATVPTCNSGHPAATLARRVRETLAEARAAGQPRPIVVGALPFDTTTPARLTVPATVHWTGPTWTQEPPDEPPVAFGTVRQTPSPETYKQSVAKALDQLEEGALEKVVLARAFDLDDVVRADVPAMLHRLAHGNPAGYVFAVDLLRGRTLLGASPELLVQRSGGLVTANPLAGSAPRHPDPDADARAGEALLASAKDLYEHSMVVDAVAAGLRQFCGDLEVPHRPALSRTPTMWHLSTRIQGRLLDPDVASIHLAAALHPTPAVCGTPQELARGAIQRLEPFNRGFYSGAVGWTDSSGDGEWAIALRCAEVAPHEIRAYAGAGIVTGSDPEAELAETTAKFRTFLRALGIERDL

SEQ ID NO: 93180 - protein, 413 aa, unidentified
  source 1..413: note = Actinomadura syzygii
  REGION 1..413: note = tr|A0A5D0UEP4|A0A5D0UEP4_9ACTN Isochorismate synthase OS=Actinomadura syzygii OX=1427538 GN=FXF65_08135; PE = 4 SV=1
MKLAVTAPDRLSVRTVPVPDPGDLVARLPHPTALAWIRDGQGIVGWGEAARLTLPGGDGNDRFTDAARLLTRLFGAADVDDPVALPGTGPVAFGSFGFDPKSPDSVLIVPRRVLGRRNGVAWLTTIGDDTEPLTLTTPPAAPTGLTWSQGALAEHAWKDAVAAAVARIRDGRLGKVVLARDVTARAAAPIDARVLLRRLADRFPACYAFSCAGLVGATPELLIRRTGGDVESLVLAGTTARGAGPADDRARGARLFASAKDREEHRYAADMVRDALAPLCAELTVPDEPELLTLPNLTHLASPVRGRLAADRSVLDVVAALHPTPAVAGTPTGTALDLIRELEGMDRGRYAGPVGWVDARGDGEWGIALRCAEIDGTRARLFAGCGIVADSDPAAELAEARTKLRPMQYALNG

SEQ ID NO: 93181 - protein, 502 aa, Actinomyces bovis
  REGION 1..502: note = tr|A0A2X0TTJ3|A0A2X0TTJ3_9ACTO Isochorismate synthase dhbC OS=Actinomyces bovis OX=1658 GN=dhbC PE=4; SV = 1
MLRVLEASAAQAAPPRLLWRTQALDPALLPGGPTAPDLLALLAGRNDVVSWVREGRGLVGIGRVLELRAHGPQRIEALRTAWRATVYHSWWSDPLVRPGTGPVALGAVAFSPSSAANSVLVVPELLLGLDEQGAWITQAMLAAGDSETLPEGSAPEVSAPELLRRFVADAEWAPLAAADPVVGGALGSMSPGASATPGPTAGATAPAAACLPAPVGAGLQPGAQGDADWMAAVEQARRALQRGDLEKVVLARDLTVVPTQAGHTGDLLRRLGADYPSCWTFAVDGMVGASPELLVRLRQRRLSSRVLAGTARRHASTPGQREAEAQRLARWLEESAKNNREHALARASALAALRPLCSVVECPERFVLTLPNVLHLASDVTGVVAGDTGALSLVGALHPTAAVCGTPRRTAAALIEELEHMDRGRYAGPVGWVDWHGEGEWCIALRSAQLAGDGSGGLSPDLPLRAFGGGGIMPDSDPADELAETKAKMRPVLDALGAQESP

SEQ ID NO: 93182 - protein, 477 aa, Actinomyces bowdenii
  REGION 1..477: note = tr|A0A3P1V830|A0A3P1V830_9ACTO Isochorismate synthase OS=Actinomyces bowdenii OX=131109 GN=EII10_05700; PE = 4 SV=1
MPRDHRPRALPRTGPAPGHPHSPDGPALDAGACRQQPPRLSFLTRALPSSTTEGLDLLALLAGHQDVSSWVHQGRGLIGLGRALTITARGPERIEALRGAWRAVVHASWWRDPLVRPGTGPVALGSIAFSPASAQASVLLVPRILVGLDADGAWITTAVAEGQDHPGIERLLAAPHPGARTPPAPTAVATPAMPAPAPGAPRQGTLSPQEWQAAVVTAQERMRRGEAHKVVLARDVLIDPPPAMTTGDLLAHLGRAYPTCWTFAVDGMVGASPEMLVRLEGRRLFSRVLAGTARIPRGLEPQQRARAVAGLAAWLRDSGKNTREHALARNSVLQALEPLCSVVEAQEPHVLELPNVLHLASDVRGVVAGDTGALSLVGALHPTAAVGGTPTAAATSIIESVEGMDRGRYAGPVGWVDWHGEGQWCIALRSAQLGARPGDPLRAFGGCGIMPDSDPADELAETEAKMRPVLEALAALA

SEQ ID NO: 93183 - protein, 419 aa, Actinomyces coleocanis
  REGION 1..419: note = tr|C0VYW4|C0VYW4_9ACTO Isochorismate synthase; OS = Actinomyces coleocanis DSM 15436 OX=525245; GN = HMPREF0044_0354 PE=4 SV=1
MKLRIQPTTTVNGLAHALTTHFPTPPGTQLDSSQLSIWHGPALMDANQPLLIGYGNSIQFPATLQTANTTWTTARDTLSPTDDSLSFEEFFSQSHLQAPIGFFSFGFNQETPGIIQIQQRTFVQTSAGAWLLEIEGDTPLTFVPIPGVDPVFNLIDDTQASWLTSVTGLVQDLQAGVAQKTVLARDVIIQSSTPIDLSLVLRKLADAYPTCWQFAVAGLAGATPEMLADVRLGLVRSRVLAGTCTPGNEADLVDSIKDLTEHRFAADSVKDALAPLCTQLSANQKPFILQLPNVSHLATDVQGELAETTVSEGAPLISVLQKLHPTAAVCGTPREVAFELIAKHETTLRGRYAGPVGWMDAAGNGAAGLALRCGQLQADKQSMQLLAGCGIMPDSNPEAELAETRAKLRPMLSVFGLVS

SEQ ID NO: 93184 - protein, 462 aa, Actinomyces hordeovulneris
  REGION 1..462: note = tr|A0A3P1WH19|A0A3P1WH19_9ACTO Isochorismate synthase OS=Actinomyces hordeovulneris OX=52770; GN = EII13_05620 PE=4 SV=1
MPATSAGCLSREALMAPIVAGRQPRWHPATLEPMNTAPVLHAATVDITDHPALPCDLLELASPSPTTVTWLRDGDGFVGVGRVADHQANGAGRFAELSAWWRAVAAQAHNDDPVQLFGSGLLACGSVAFAPTSERRSRLVVPRVVVGRRAGRAWLTVIDSAPVASPRPDAVLAQLRAAHTPPTTPSAPRTRPGALRRSQWQAAVGEAIELLRAGKLAKVVLARDLAIDFAAPLDVRSPLGSLTRTYPNCWTFAIDGLLGATPEMLVRLDQGLVTCRVLAGTIHRTGDDDADAARAGSLARSSKNLAEHEYAVQSVADALASHCATLYVPEHPFVLQLANVMHLATDVTGVLPAGSPTSCLQLAAALHPSAAVGGTPRAAALAQIARLEKMDREAYAAPVGWLGADGDGEWGIALRCGQLSPDGRSLRLFAGGGVLAESDPAAELAETEAKMRPMLTAVGLAH

SEQ ID NO: 93185 - protein, 452 aa, Actinomyces howellii
  REGION 1..452: note = tr|A0A448HJE9|A0A448HJE9_9ACTO Isochorismate synthase entC OS=Actinomyces howellii OX=52771 GN=entC; PE = 4 SV=1
MAACLSLAARDLLERPPRLTFTTTELTGAPWAAPGPPLSLLAGRDDVVAWVRHGQGLVGWDPVLRIEATGPGRIEELRAAWRAVVHASWWSDPLVRPGTGPVALGAITFSPSSSERSVLLVPGVLVGRDARGSWVTTVRARGQDPDGGLDLRALTAAAAASRGVPQAPGARVTPGARSEASWRAAVAQASARLRAGEADKVVLARDVTAVPRATGTTGDLLGRLAAAYPSCWTFAADGMVGATPELLVRLRDRRLSSRVLAGTARRRRAGGDQPADEPSALAAWLEADPKNNREHALARASALSSLEPLCSVVEAPERFVLTLPNVLHLASDISGVVAGDTGALALVGALHPTAAVCGTPTPAAARLIDELEGMDRGRYSGPVGWVDWHGEGEWCIALRAAQLAEGGRTGTGPQAPVRVLGGGGIMPSSDPADELAETAAKMRPVLDALGAP

SEQ ID NO: 93186 - protein, 502 aa, Actinomyces israelii; identical to SEQ ID NO: 93181
  REGION 1..502: note = tr|A0A3S5EJ30|A0A3S5EJ30_9ACTO Isochorismate synthase dhbC OS=Actinomyces israelii OX=1659 GN=dhbC PE=4; SV = 1

SEQ ID NO: 93187 - protein, 450 aa, Actinomyces johnsonii
  REGION 1..450: note = tr|A0A508A4A5|A0A508A4A5_9ACTO Isochorismate synthase OS=Actinomyces johnsonii OX=544581 GN=FK256_02485; PE = 4 SV=1
MRADHCLAAPPRLSFRTHELPEGSLEGVALIDLLAGREEVVSWVHEGRGLIGLRRALTIEAHGDERIEALRAAWRSVIGTAWWRDALVRPGTGPVALGAITFSPASEQSSVLMVPEVLIGLDDDGAWLTTAVSAATGGVEPEHPDPEALIKALVTEARTAIGREHEDGDAGATAVEAGALSEEQWCRTVARTQERMRSGQARKVVLARDVLARPTAPLATGTVLRRLASDYPSTWTFAVDQMVGASPELLLRLRDRRLTSRVLAGTARRRAGEDAPATARLAAWLEGSEKNNREHELARASAITALEPLCSVVNAPARFVLSLPNVLHLASDVTGVVAGDTGALALVDALHPTAAVCGTPTPAAARLIEEAESMDRGRYAGPVGWVDWHGEGEWCIALRSAQLPAGGPGPHSPARVFGGGGIMPDSEPADELAETTAKMRPVLGALGVSP

SEQ ID NO: 93188 - protein, 453 aa, Actinomyces naeslundii
  REGION 1..453: note = tr|J3JK06|J3JK06_ACTNH Isochorismate synthase; OS = Actinomyces naeslundii (strain ATCC 12104 / DSM 43013 / JCM 8349 / NCTC 10301 / Howell 279) OX=1115803; GN = HMPREF1129 _2191 PE=4 SV=1
MRADHCRDAPPRLSFRTHELPEEALEGLALIDLLAGREDVSSWVHEERGLIGLGRVLVIEAHGAERIEALRAAWRATVGAAWWRDALVRPGTGPVALGTISFSPASRQPSVLVVPKALIGLDDEGVWLTTVVPAPSGEAEPEHPDPEALIKALVVEARAAIGQERTGSDKDSGGTTAVETGALSEEQWCRAVAGTQERMRAGHARKVVLARDVLARPPAPLATGTVLRRLASDYPSTWTFAVDQMVGASPELLLRLRDRRLISRVLAGTARRHAGEDALATARLAAWLEGSEKNNREHELARASAITALEPLCSVVEAPARFVLTLPNVLHLASDVTGVVAGDTGALALVDALHPTAAVCGTPTPAAARLIEEVESMDRGRYAGPVGWVDWHGEGEWCIALRSAQLPTGGPGPHSPTRVFGGGGIMPDSDPTDELAETIAKMRPMLGALGVRW

SEQ ID NO: 93189 - protein, 456 aa, Actinomyces oris
  REGION 1..456: note = tr|A0A508BGL4|A0A508BGL4_9ACTO Isochorismate synthase OS=Actinomyces oris OX=544580 GN=FK267_05745 PE=4; SV = 1
MRAEHCLAAPPRLSFRTHELPEGALEGLALIDLLAGREDVSSWVHEGRGLIGLGHVLVIEASGADRIEALRAAWRAVVGAAWWRDALVRPGTGPVALGAITFSPSSEQSSVLVVPEVLVGLDDSGAWLTTVVSGADDGSEPEHPDPGSLLTALVADARASVDREQAGTDRDSGDSGGTTAVEAGALSEEQWCRAVCATQERMRAGQARKVVLARDVLAYPGGPLATGTVLRRLASDYPSTWVFAVEQMVGASPELLLRLRDRRLMSRVLAGTARRHAGEDALATARLASWLEGSEKNNREHELARDSAITALEPLCSVVEAPARFVLTLPNVLHLASDVTGVVAGDTGALALVDALHPTAAVCGTPTQAAARLIEEAESMDRGRYAGPVGWVDWHGEGEWCIALRSAQLPTGGPGPQSPARVFGGGGIMPDSEPVDELAETTAKMRPMLGALGVPD

SEQ ID NO: 93190 - protein, 467 aa, Actinomyces slackii
  REGION 1..467: note = tr|A0A3S4UQI8|A0A3S4UQI8_9ACTO Isochorismate synthase dhbC OS=Actinomyces slackii OX=52774 GN=dhbC PE=4; SV = 1
MTGHPIAAHPGPTLTAAHCQAAPPALSFTTTPIREQGLSLPALLAGRDDVVSWLHQGRGLIGMGHALTIEARGPERIEELRSAWRATIGAAWWRDPLVRPGTGPVAMGTITFSPASRERSALIVPSVLIGHDTHGAWLTTVVPAGQPHPSPEAIMAALHPQQPGPQPRADSPGPQPGSLSEQDWCRAVLTVQERMRAGQADKVVLARDVVLPGPHPATGDLLARLAHSYPTCWTFAVDGMVGASPEMLLNLEGRRLFSRVLAGTARRNQGTPTQDLAHWLAGSAKNTREHALARASALEALEPLCSVVEGGEPFVLELPNVLHLATDITGVVAGDTGALSLLGALHPTAAVGGTPTAAATAIIEQVEGMDRGRYAGPVGWVDWHGEGQWCIALRSAQLPQGGSTASGETGIRVFGGCGIMPDSDPVDELAETQAKMRPILEALAAPTHSAHAAHATPSAHATHPAPR

SEQ ID NO: 93191 - protein, 453 aa, Actinomyces sp.
  REGION 1..453: note = tr|A0A4P8ZHH9|A0A4P8ZHH9_9ACTO Isochorismate synthase OS=Actinomyces sp. oral taxon 171 str. F0337; OX = 706439 GN=FBF36_10535 PE=4 SV=1
MRAEHCLADPPRLSFRTHELPEGALEGLALIDLLAGREDVSSWVHEGRGLIGLGRVLVIEAAGADRIEALRAAWRAVVGAAWWRDALVRPGTGPVALGVITFSPASQQSSVLVVPEVVVGCDGSGTWLTTVVPVAADGAEPEHPDPEIRLGAMVAEARTVIGREQSGDDGDSGGTTTVEAGALSEEQWCRAVSATQERMRAGRARKVVLARDVLAYPGAPLATGTVLRRLARDYPSTWVFAVDQMVGASPELLMRLRDRRLISRVLAGTARRHAGEDALATARLASWLEGSEKNNREHELARDSAITALEPLCSVVEAPARFVLTLPNVLHLASDVTGVVAGDTGALALVDALHPTAAVCGTPTQAAARLIEEAESMDRGRYAGPVGWVDWHGEGEWCIALRSAQLPAGGPGPQSPARVFGGGGIMPDSEPVDELAETIAKMRPMLGALNVRL

SEQ ID NO: 93192 - protein, 470 aa, unidentified
  source 1..470: note = Actinomyces succiniciruminis
  REGION 1..470: note = tr|A0A1L7RHP9|A0A1L7RHP9_9ACTO Menaquinone-specific isochorismate synthase OS=Actinomyces succiniciruminis; OX = 1522002 GN=AAM4_0314 PE=4 SV=1
MGAPGPAPDSSAHPAPAAPALSAVQAAAAPPHLSFRTVALPAGVITPEGGDGGTGLLDLLAGREDVVSWVRHGRGLVGWGQALRLEAQGPDRIEALRSAWRATVYASWWRDALVRPGTGPVALGAIAFSPASAAVSVLTVPRVLVGLDDFGAWLTTAVADGEAHPEVAEVLARLRPPASAQTDVPSPEAPVVSAGALPEADYLAAVAEVRRRIAAGEARKVVLARDLLVRPAAPLATGDLLRRLGANYPPCWTFAVDSMVGATPELLVRLENRRLASRVLAGTARRHPGDAATREREAERLAQWLAASAKNRAEHEFARASALSSLEPLCSVVEAAAPRVLTLPNVLHLATDITGVVAGDTGALSLVGALHPTAAVCGTPTAAAARVIAEVEGMDRGRYAGPVGWVDWHGEGEWCIALRSAALPPGGAGPEAPARVFGGGGIMPESVPADELAETTAKMRPMLTALGADV

SEQ ID NO: 93193 - protein, 453 aa, Actinomyces viscosus
  REGION 1..453: note = tr|A0A5F0KQ22|A0A5F0KQ22_ACTVI Isochorismate synthase OS=Actinomyces viscosus OX=1656 GN=E4J66_07340; PE = 4 SV=1
MRAEHCRVASPRLSFHTHELPEDALEGLTLIDLLAGRADVSSWVHEGRGLIGLGRVLVIEAHGADRIEALRAAWRAVVGAAWWRDALVRPGTGPVALGAITFSPASKQSSVLVVPEILVGLDDSGAWLTTVVPEADDGTEPEHPDPEMLLRAMVAQARAAVDRERAGDARDSGGAAAVETGALSEEQWCQAVSTTQERMRTGQARKVVLARDVLVGPSRLLATGTVLRRLARDYPSTWVFAVDQMVGASPELLLRLRDRRLISRVLAGTARRHAGEDALATARLASWLEGSEKNNREHELARESAITALEPLCSVVEAPARFVLTLPNVLHLASDVTGVVAGDTGALALVDALHPTAAVCGTPTQAAARLIEEAESMDRGRYAGPVGWVDWHGEGEWCIALRSAQLPPEGPGPQSPARVFGGGGIMPDSEPVDELAETTAKMRPMLGALGVPG

SEQ ID NO: 93194 - protein, 492 aa, unidentified
  source 1..492: note = Actinomycetales bacterium
  REGION 1..492: note = tr|A0A1R4FEJ3|A0A1R4FEJ3_9ACTO Menaquinone-specific isochorismate synthase OS=Actinomycetales bacterium JB111; OX = 1434822 GN=CZ771_06920 PE=4 SV=1
MDHRNTAAPVRYARDAVWVRAGVGLRGSGGTRIALTGPRRLARLAEIWRRLEAASSDPDVSPVAFVGSTFVEDSAVSSILHVPASVRRVGEEGEWTQFVSSQALADALAADAEGLGEHAAHAARELPDGDLGLTRDEDDEETGDTLPPPSAVKSRGAKRYTRLVKRVLTRIAAGEAEKVVTSRAVDLTVTPDVLGALPATLAEAYPNAWTFAVGGLVGATPEMLAARDGDRVTSRVLAGSLPRGTRPDAELRAELTGSERFAAEHAHAARSVIDGLARVLTLENADPEPFVLELPNILHLATDVIGTPTGEIGLLDVLDGIHPTAAVGGTPTDAALAIIADLETHDRGRYAGPVGWLDAAGDGEIGLALRCGQVDGHSIRLYAGGGIVAGADPAAELAETEGKLRPMREALGDATAAPDGDTTSASEGDTAAPDGDATAAPDGDATSASEGDTAAPDGDATAAPDGDATPAPEGDTTPAPNGDTTPAPDGDE

SEQ ID NO: 93195 - protein, 436 aa, Actinoplanes sp.
  REGION 1..436: note = tr|G8SM61|G8SM61_ACTS5 Salicylate synthetase; OS = Actinoplanes sp. (strain ATCC 31044 / CBS 674.73 / SE50/110) OX=134676 GN=trpE PE=4 SV=1
MTRHYRTAVIETSDEPIACALAVADLFDDYVVYEAPDGWYVAGGWAAEVVVGPRTVRCVHDGQVTETPWDDDPLVPVRRFLDGLPLAGWRAYGWCAFELGAAIAGLEPPEDVLAHFLIPTVETRLRGTQATVRGLTAEDLALVERRLTTPVRRAGRAAGRARVDLGAGTAEYQDAVATLVGDIRAGKLEKAVLSRVIGVPEKIDFPASFEVGRRRNTPARSFLLDMRGLQVFGFSPEIVLSVDADGTVVSQPLAGTRALSGDAETDERLRHQLRTDPKEIHEHAISVRVAVEELHEPCRPDTIAVSEFMAVKERGSVQHLGSQVTGRLAEGRDAWSALAAVFPAVTASGVPKQAAYEAISRLEGQRRGPYAGAVVTVGADGTMDAALVLRSAYSRDGVTWLRAGAGVVGQSRPERELEETREKLGCIAGYLVVSEG

SEQ ID NO: 93196 - protein, 379 aa, Actinosynnema pretiosum
  REGION 1..379: note = tr|A0A290ZGQ0|A0A290ZGQ0_9PSEU Isochorismate synthase OS=Actinosynnema pretiosum OX=42197; GN = CNX65_13830 PE=4 SV=1
MGAAVNAVHANATGAASGAAHADAMGAVGGGARGAAGSEAGSGAPGAANSGSPDAINNGLPGAANNGTTGAPGSDTPVNSTPRASHSALPSAPGWRVSPSPSPAAYADAVARALEMIGAGELAKVVVARALDVTAPHRLEVPELLARLVAADPAAHAFAIDVSAPGDPATRTLVGASPELLVSRRGDRVVANPLAGSLPRTGDPVEDARRGAALLASAKDLAEHEHVSAQVAGVLGRFCAELDVPAPVVIATPTMLHLSTTITGRLTDPDDPASSALGLAEALHPTPAVCGVPTERAARAITALEPRERGYYAGLVGWTDLAGDGEWVVTIRCAEVCGDTARLFAGAGVVAGSSPSAEVVETGAKFGTMLRALGLGDVA

SEQ ID NO: 93197 - protein, 417 aa, Adhaeribacter sp.
  REGION 1..417: note = tr|A0A369QH34|A0A369QH34_9BACT Isochorismate synthase OS=Adhaeribacter sp. HMF7616 OX=2072847 GN=entC; PE = 4 SV=1
MISALPIELENSRVNLEGDSNVILKALFATAIRFHLPVAVWRLPNTSEIKLCVSLRPAQTSGDVPQLESGVSGFAFYPFQVSATYPAHFIKADITYSSLSAKLKFNFKLNENPEYVALVQRLQEYFEKIKGSAHTSNWHVSRKVKPYQTSEANFKHLVEESVAAIDAGQMEKVVLSRVRSTELTAGFDLMATYLRLQKTYPNAFVSLVSIPEMGTWMGASPEILVQVSKDRIFKTVALAGTQALTPDCNPAKALWQQKEIEEQSLVKRYILHCFKRIQLRDYTEIGPRTVVAGNLMHLRTDFTVDMKKEAFPMLGTHMLQLLHPTSAVCGMPKETAMEFIMQKEGYDRAYFSGFLGPVHIDGESNIYVNLRCSQLLEQVALTYAGAGITAESEPDKEWLETRLKMDTIRQVFQNSAL

SEQ ID NO: 93198 - protein, 427 aa, Adlercreutzia equolifaciens
  REGION 1..427: note = tr|A0A3E2EH33|A0A3E2EH33_9ACTN Isochorismate synthase OS=Adlercreutzia equolifaciens OX=446660; GN = DX903_10085 PE=4 SV=1
MTRIYTCNVPIEADLVDAFCWLQKGFTDQFVYYDKQRACRYMGLGRCIALPSLRDVEYEYGEGSSLHEVAAGEDAAEQPPVFFSFNRFDATNPAPADELMASFPRLRFMLPEIVLIENERGRFLQVNSLGPVYPGRVARFTRMVAAAPPRQRATVPFALEPDSREAWGEAMDAALAAIGEGRVSKVVLSRRLRLLAEHPFSSKDLLVNLIDGDARGTVLLYRYADVFFCGCTPELLVRKRGDVVESMCLAGTCPAGATAAESDALAEALLADGKNRAEHDYVVQLIRSVLDRVCYDVDVPAVPEIMRLAHVQHLFTPARARVLAGITLADLMEDLHPTPAVAGTPVGEAKMLLRAIEPYNRGFYAGACGFVDGAGDGEFSVALRTGVFDGEMGYVYGGCGIVGESDADAEYEEIDLKLRTTLSAFGA

SEQ ID NO: 93199 - protein, 404 aa, Advenella kashmirensis
  REGION 1..404: note = tr|V8QVV2|V8QVV2_9BURK Isochorismate synthase; OS = Advenella kashmirensis W13003 OX=1424334 GN=W822_02350; PE = 4 SV=1
MSSETPIPGKPSDNNINAANREADQWLIDDFRVGDFFFASPDRQFRGSRKDVAVVSYQPASAETIHALFDQARQRGVAEPVMFGLVPFDVSRRASLAIPSHVDNAPVPNERVRQSDQSGRPQVANQKPVPEPEQYGEMVRKALGLMSEEGLRKIVLSRTMEVTLDRPLEYARLLPDLLSRNAHGYTFAIPVWDADGQTQPVGMMVGASPELLVRRVGDTIHVNPLAGSIGRNPDPSRDQQLKDGLAVSEKDLREHSYVVNDIARILREHCVDLDIPERPSVIGTDTLWHLSTYITGRLRNPEMTALELACELHPTPAICGYPTATAFSHLPDLEPFDRGYFAGLVGWQQANGDGEWALSLRCAQQTGEDTLRLFAGAGIVTGSNPDHEILETATKMETFMRAIR

SEQ ID NO: 93200 - protein, 355 aa, Aequorivita antarctica
  REGION 1..355: note = tr|A0A5C6Z256|A0A5C6Z256_9FLAO Isochorismate synthase OS=Aequorivita antarctica OX=153266; GN = ESU54_02760 PE=4 SV=1
MDYNLLIEKLLKHHSKNLPFVVFSLPESNSMNAFFQKDMQLCTVNKLTENGFVFAPFDYKDTTFFIPENDSESLQCEFINHNIELTSVTVSDDIEEKESYIKLVDKAIEAIKKRSANKIVVSRQKDFELKDFSIEKLIERLFSSYPTAFRYIWYHPNTGLWCGATPETLVQIENNSFKTMALAGTQPFTNRVPVFWGSKELDEQQLVTDVIIDSLQRVTSVLKVSNPFTYQAGSLLHLRTDITGVLKNGKATLTTITAALHPTPAVCGSPQKFANEFILENEGYNREFYTGFLGPILENGQSASLMVNLRCMKIEGNIAHVFVGGGITLGSQPQDEWNETQNKMQTMLQVLQPML

SEQ ID NO: 93201 - protein, 355 aa, Aequorivita lipolytica
  REGION 1..355: note = tr|A0A5C6YQL5|A0A5C6YQL5_9FLAO Isochorismate synthase OS=Aequorivita lipolytica OX=153267; GN = ESV24_07435 PE=4 SV=1
MDFHLLIKKISKQLKDELPLVVYSFPQQNTVTALLQKTNELFDISEFNANGFVFAPFDYKNSTCFIPESNSEKLQSELIESEINLASVKVNEDNSEEKIHLQLVQKAIENIKRRNANKIVISRPKDFPLRNFSFELLLTRLFSAYPTAFRYIWYHPQTGLWCGATPETLVQVENDSFKTMALAGTQPFTNRKPVIWGPKELDEQQLVTDAITNSLQRVTSVLKVSNPHTHRAGSMYHLRTDITGILKRGKATLTKIAAALHPTPAVCGTPPKFAKEFILQNEGYNREFYTGFFGPIQENGATAMLLVNLRCMKIENNTARIFVGGGITIGSQAKEEWEETQNKMQTMLQVLAPML

SEQ ID NO: 93202 - protein, 354 aa, Aequorivita sp.
  REGION 1..354: note = tr|A0A410FZS4|A0A410FZS4_9FLAO Isochorismate synthase OS=Aequorivita sp. H23M31 OX=2494375; GN = EI546_01545 PE=4 SV=1
MDFKTLIEKVSLQYEKKLPFVIFSKTSSETVRCYCQQNDNLYIDDSLSNNGFVLSPFDSRLESYLIPKNESESFETYFKISEIEKERVEVSELESDRIAYEEFISETIDTIQKGDAAKIVVSRKKDFQLSDFSIASLVERLFSAYPTAFRYVWFHPKTGIWCGATPEILVNIEQNKFRTMALAGTQPYTSGEITWRKKEMEEQHFVTEAILENLNGIVNDIEVSETRNHRAGSLLHLCTDISGKLGEEEGALAKIAWALHPTPAICGTPQKYARDYIIENEGYPREFYTGFLGPIEEDNASATLMVNLRCMKIENETASIFVGGGITADSHPEEEWKETQNKMQTMLQVLQPML

SEQ ID NO: 93203 - protein, 355 aa, Aequorivita sublithincola
  REGION 1..355: note = tr|I3YYH0|I3YYH0_AEQSU Isochorismate synthase family protein OS=Aequorivita sublithincola (strain DSM 14238 / LMG 21431 / ACAM 643 / 9-3) OX=746697 GN=Aeqsu_2583 PE= 4; SV = 1
MDLNLMIEKISNHYNEKLPFVVYSLPQSGSISVLLQKNDSLNTIENLGGNGFVFAPFEYKGFSYFIDENDSEKHQFDFKSEAIESISVAVSEDISEQNTYIKLLSKTIETIKGSRANKIVISRFQNFQLKDFSIEKLIIQLFSKNPTAFRYIWYHPKTGLWCGATPETLVQIENKSFKTMALAGTQPFTNQEPVIWGVKEEYEQQLVTDAIINSLQRVTSVLKVSKTYTHRAGSLLHLRTDISGVLRTGEATLAKIAKALHPTPAVCGSPQQFAQQFIIENEGYDREFYTGFLGPILDDGNTASLMVNLRCMKIDDNQARIFVGGGITLASQPQEEYEETKNKLQTMLQVLQPML

SEQ ID NO: 93204 - protein, 473 aa, unidentified
  source 1..473: note = Aeribacillus composti
  REGION 1..473: note = tr|A0A559UR25|A0A559UR25_9BACI Isochorismate synthase MenF OS=Aeribacillus composti OX=1868734 GN=menF; PE = 3 SV=1
MVSIPCSDTLRDKVANAVNHVKKYSHPIILSYVFEIKEKDPLQIFSSFQSAYAGKRFYWATPDRTFILCGIGVELELTTDKKFSNRFFDIYSKWKDWKEHIQIEGAHPIGTGPLLFGGFSFDPLKNANSSKWKPFHEARFTLPSFMITKIGRHTLATINRLIQSTDDINEIINHFNTYEYTLKKKNENTNSFLNFTIKKESLFYKKEWMAAVEKATEQIKQNRFEKVVLAREMLLEFEGSIDIHYVLSMLNEHQPNCYLFVVENEGKTFVGATPERLVSKRDQKVQSACVAGSIKRGKTVEADEEYAQMLLSDTKNIHEHQIVVKAIEKVFREYCQEVQLQNNPTILKTPNIQHLYTPVEGTVKKGFTLIDFVEKLHPTPALGGYPKDAALAFIRNEEPLERGWYAAPVGWMDDQDNGEFVVAIRSGLLDEQKAYLYAGCGIVGDSKPEEEYRETEIKFGPMQHALGGKLNEK

SEQ ID NO: 93205 - protein, 478 aa, Aeribacillus pallidus
  REGION 1..478: note = tr|A0A223E5D6|A0A223E5D6_9BACI Isochorismate synthase MenF OS=Aeribacillus pallidus OX=33936 GN=menF; PE = 3 SV=1
MEGSSLVSIPCSDTLRDKVANAVNHVKKYSHPIILSYVFEIKEKDPLQIFSSFQSAYSGKRFYWATPDRTFILCGIGVELELTTDKKFSNRFFDIYSKWKDWKEHIQIEGAHPIGTGPLLFGGFSFDPLKNANSSKWKPFHEARFTLPSFMITKIGRHTLATINRLIQSTDDINEIINHFNTYEYTLKKKNEDTNSFLNFTIKKESLFHKKEWMAAVEKATEQIKQNRFEKVVLAREMLLEFEGSIDIHYVLSMLNEHQPNCYLFVVENEGKTFVGATPERLVSKRDQKVQSACVAGSIKRGKTVEADEEYAQMLLSDTKNIHEHQIVVKAIEKVFREYCQEVQLQNNPTILKTPNIQHLYTPVEGTVKKGFTLIDFVEKLHPTPALGGYPKDAALAFIRNEEPLERGWYAAPVGWMDDQDNGEFVVAIRSGLLDEQKAYLYAGCGIVGDSKPEEEYRETEIKFGPMQHALGGKLNEK

SEQ ID NO: 93206 - protein, 422 aa, unidentified
  source 1..422: note = Aeromicrobium camelliae
  REGION 1..422: note = tr|A0A3N6ZIE3|A0A3N6ZIE3_9ACTN Isochorismate synthase OS=Aeromicrobium camelliae OX=1538144; GN = EHW97_00085 PE=4 SV=1
MSNPIADPSSVDDTAPLVVRTRRIDDPGDLLALLPPDQALAWVHGGDGLVAWGRAATFSTRGADRFADADAWWRAHVARSVSRDDVNRPGSGLVAFGSFAFADRGEGTTLVVPEVVVGRRDGVSWITTIGTTLSAPPTLTAHDDLGSGPAVDFEDDDSRRARWRDTVAAAVDRIAAGELDKVVLARSVDAVSDEVVDVRRPLRRLAAQYPSCWTFHVDGFFGSTPEMLVRLEGGLVTSRVLAGTIRRSGDDHRDLALAASLAHSSKDLEEHEYAVASVAEALAPHCTGMNVPEAPFVLHLPNVMHLATDVTGVLRADASALSLAAALHPSAAVGGTPRPAAVDLIEEIEGLDRARYAGPVGWIGADGDGEWGIGLRSAQLLDDGRRVRLFAGCGIVADSVPADELAESDAKLVPVRTSLTEA

SEQ ID NO: 93207 - protein, 419 aa, Aeromicrobium marinum
  REGION 1..419: note = tr|E2SF27|E2SF27_9ACTN Isochorismate synthase; OS = Aeromicrobium marinum DSM 15272 OX=585531; GN = HMPREF0063_12636 PE=4 SV=1
MSNPAASETSAAHALLLVRTVEVPDPGALLDLLPPGPESLAWVHGQDGIVGWGRAAGLEVSGRWRFDEARRWWEQTVEHAVVRDEIGRPGSGLVAFGSFDFAADGSGALHVPAVVVGRRDGVCWLSVIGPTITAVPELAPAEPPHAPQGTDLQDGPVDAEQWMAVVAEAIARIGADRLDKVVLARERLARFERPLDVRWPLRRLAREYPACWTFHVDGFFGSTPEMLVRLERGLVTSRVLAGTIRRTGDDAHDAALAGSLARSSKDLEEHEYAVRSVTDALAPHCTAMSVPDAPFVLHLPNVMHLATDVTGVVRSHTSALTLAAALHPSAAVGGTPTPDAVRLIAEIERLDRGRYAGPVGWIGAGGDGEWGIGLRSAEITDDGLTARLFAGCGIVADSVPADELAESDAKFVPVRDALS

SEQ ID NO: 93208 - protein, 418 aa, Aeromicrobium sp.
  REGION 1..418: note = tr|A0A554SBG5|A0A554SBG5_9ACTN Isochorismate synthase OS=Aeromicrobium sp. Co35 OX=2590901; GN = FNM00_08680 PE=4 SV=1
MSNPVTDPRWEIEPLIVRTRRIDDPGELISLLPDSGQLAWVHGGDGLVGWGRAAQFGWTGPERFDEADRWWRTLANRAVVRDDIEAPGSGLVAFGTFTFSDHADGSLLVVPEVVVGRRDGVCWLTTIGRAITAAPALEAASPARAVAVALDDDDSRRATWRDIVATAVDRITADELDKVVLARSVDAVADEAIDVRHPLRRLAQEYPSCWTFHVDGFFGSTPEMLVRLEGGLVTSRVLAGTIRRSGDDHRDLALAASLARSSKDLEEHEYAVASVADALAPACTGMNVPESPFVLHLPNVMHLATDVTGVLREEASALSLAAALHPSAAVGGTPTTDAVELIEEIEGMDRGRYAGPVGWIGANGDGEWGIGLRSAQVLEDGSRVRLFAGCGIVADSVPADELAESDAKLVPVRTSLES

SEQ ID NO: 93209 - protein, 439 aa, Aeromonas allosaccharophila
  REGION 1..439: note = tr|A0A1Q5VQ45|A0A1Q5VQ45_9GAMM Isochorismate synthase MenF OS=Aeromonas allosaccharophila OX=656; GN = menF PE=3 SV=1
MLAQTHIKQQLDALRHSNVSGFVRLRVAIETRSFLGWLAAQTLYPRIYWQARGEDRPEYVALGAIHELTEPHAIKQVCANASQHHDDSPRYYGGLAFDPAQSGWQGFGPCRFVLPRIELVRRGECVSLCLNLWLDDHNLEAELQAAEAALDALRPEAPLPALQKQPWQRQDCPGPIQWQTLVERVTAPDFQAHTPKVVLSRESVLTSPNHDADINPWAMLGQWARHAQDCFHFGFQFSPEQAFIACSPERLYRREGSHLFTEALAGTIRRSGDEEVDAQLAAELLADSKNRLENRLVHADILSRLAPLAHDATLTEPRILKLRLLQHLKCDIEAELKPGVCDWQLLDALHPTPAVGGAPREAALAFIREFEPYDRGWYAGACGMLSRETSEFSVAIRSARIQSGSVTLFAGAGIVAGSEPVAEWAELDNKIANVLSLLG

SEQ ID NO: 93210 - protein, 443 aa, Aeromonas caviae
  REGION 1..443: note = tr|A0A2X4NSK6|A0A2X4NSK6_AERCA Isochorismate synthase MenF OS=Aeromonas caviae OX=648 GN=menF PE=3 SV=1
MLAQTHLKQQLDALRHSTVSGFVRLRVAAHVDVFPGWLAAQTLYPRIYWHARGQQSPEYVALGAIHELTRPEDIQRVCDLAGTASEDSPRYYGGLAFDPDLPGWQGFGPCRFVLPRIELVRRGECTSLCLNLWLPAREEGHAFEAELCAAEAALDALQPEAPLPALQKRPWQRQDLPGPAQWQTLVEQVTAPDFQARTPKVVLSRESLLQSEAHDAPLCPWSLLTQWARHAQECFHFGFQFSPEQSFISCSPERLYRREKGHLFTEALAGTIRRSGDEATDAALAAELLADSKNRLENRLVHADILSRLAPLTTDATLTEPRILKLRLLQHLKCDIEAELKPGVCDWQLLAALHPTPAVGGAPREAALAFIRECEPHDRGWYAGACGMLSRETSEFSVAIRSARIRGQRISLFAGAGIVAGSEPAAEWAELDNKIANVLSLLG

SEQ ID NO: 93211 - protein, 448 aa, unidentified
  source 1..448: note = Aeromonas dhakensis
  REGION 1..448: note = tr|K1J5V1|K1J5V1_9GAMM Isochorismate synthase MenF; OS = Aeromonas dhakensis OX=196024 GN=menF PE=3 SV=1
MLAQTHIKQQLDALRHGNASGFVRLRVAIEVRSFLGWLAAQTLYPRIYWHARGQDNPEYVALGCLRELTEPRAIRQVCEHTSQPHDDSPRYYGGLAFDPTQPGWQGFGPCRFVLPRIELVRRGECITLCLNLWLPEQTGGDAFEAELQAASAALDALQPEAPLPPLARHPWQREDCPSQPQWQTLVEQVTAADFQAHTPKVVLSRQSRLTHEGATNATEPQAVAPWSLLASWAQHGQDCFHFGFQFSPEQSFIACSPERLYRREQQHLFTEALAGTIRRSGDEATDAALAAELLADNKNRLENRLVHADILSRLAPLTTDASLTEPRILKLRLLQHLKCDIEAELKPGVCDWQLLEALHPTPAVGGAPREAALAFIREREPYDRGWYAGACGMLSRETSEFSVAIRSARITAQAITLFAGAGIVAGSEPAAEWAELDNKIANVLSLLG

SEQ ID NO: 93212 - protein, 438 aa, Aeromonas diversa
  REGION 1..438: note = tr|N9VBI4|N9VBI4_9GAMM Isochorismate synthase MenF; OS = Aeromonas diversa CDC 2478-85 OX=1268237 GN=menF PE=3; SV = 1
MLAPTHLMQQLDALRHEATCGFVRLRVPTRVDSFLGWLSSQPLYPRIYWHARGDDRPEYAALGCIHEIRDPARLHALCDQTALPGADSPRYFGGLAFDPDGEGWPGFGPCRLILPRIELVRRGEEVSLCLNLLLCEDEREQEIARAEAALQMLCPERPLPPLAGGGYRRSDTPDFATWRSLVERVTDTDFQTHTPKVVLSRASRLETARPVGPWQMLESWRARAQDCFHFGFQFDPAQAFISCSPERLYRREGDHLFTEALAGTIRRSGDEATDSALARELLSDDKNRLENRLVHADILSRLAPLAKQTSLTEPRILKLRLLQHIKCDIEAELHAGVNDWQLLAALHPTPAVGGAPREAAIDFIRRHEPYRRGWYAGACGMLSRDTSEFSVAIRSALLDADSVTLFAGAGIVAGSEPSAEWAELDNKIGNVLSLLAQD

SEQ ID NO: 93213 - protein, 446 aa, Aeromonas encheleia
  REGION 1..446: note = tr|A0A448KRR2|A0A448KRR2_9GAMM Isochorismate synthase MenF OS=Aeromonas encheleia OX=73010 GN=menF PE=3; SV = 1
MLAQTHIKQQLDALRHSHVSGFVRLRVAVEVQSFLGWLTAQTLYPRIYWQARGPKSPEYVALGRIHELSRPEDIRRVCDNTGTDSEDSPRYYGGLAFDPTQPGWPGFGPCRFVLPRIELVRRGECISLCLNLWLPAPERASEFDAELRAAEAALDALQPEAPLPPLHRQAWQREDCPSPALWQALVEQVTAPAAQAHTPKVVLSRESRLTPRDESDDRTALSPWSLLAQWAQHAQECFHFGFQFSPEQSFISCSPERLYRREGRHLFTEALAGTIRRSGDEATDAALAAELLTDSKNRLENRLVHADILNRLAPLTSRASLTEPRILKLRLLQHLKCDIEADLSPGVGDWQLLDALHPTPAVGGAPRESALTFIRAFEPYDRGWYAGACGMLSRETSEFSVAIRSALVREQTITLFAGAGIVAGSEPAAEWAELDNKIANVLSLLG

SEQ ID NO: 93214 - protein, 439 aa, Aeromonas enteropelogenes
  REGION 1..439: note = tr|A0A175VHY3|A0A175VHY3_AEREN Isochorismate synthase MenF OS=Aeromonas enteropelogenes OX=29489; GN = menF PE=3 SV=1
MLAQTHIKQQLDALRHNNVSGFVRLRVGIEVRSFLGWLAAQTLYPRIYWHARGQDRPEYVALGAIHELTEPDAIRQVCTNTSQYHDDSPRYYGGVAFDPAQPGWQGFGACRFVLPRIELVRRGECVSLCLNLWLTKENLESELAAAEAALDALQPEAPLAQLQKQRWQRQDCPEPAQWQRLVEQVTSPEFQAHTPKVVLSRESVLTSHQGGEDVCPWVMLNQWIGHAQDCFHFGFQFSPEQAFIACSPERLYRREDRHLFSEALAGTIRRSGDEATDAALAAELLADSKNRLENRLVHADILSRLAQLAHDATLTEPRILKLRLLQHLKCDIEAELKPGVCDWQLLEALHPTPAVGGAPREAALAFIRENEPYERGWYAGACGMLSRETSEFAVAIRSARIQPGSVTLFAGAGIVAGSEPAAEWAELDNKIANVLSLLG

SEQ ID NO: 93215 - protein, 448 aa, Aeromonas hydrophila
  REGION 1..448: note = tr|A0A2R4U0B0|A0A2R4U0B0_AERHY Isochorismate synthase MenF OS=Aeromonas hydrophila subsp. hydrophila; OX = 196023 GN=menF PE=3 SV=1
MLAQTHIKQQLDALRHGNASGFVRLRVAIEVGSFLGWLAAQTLYPRIYWHARGHDRPEYVALGCLRELTEPQAIRQVCEHTSQPHDDSPRYYGGLAFDPTQPGWQGFGPCRFVLPRIELVRRGECVTLCLNLWLPEQTGSDAFEAELQAAAAALDALRPEAPLPQLTPHSWQREDCPSQPQWQTLVEQVTAPEFQANTPKVVLSRQSRLTHDGATHAADPQAVAPWSLLASWAQHGQDCFHFGFQFSPEQSFIACSPERLYRREHQHLFTEALAGTIRRSGDEATDAALAAELLADSKNRLENRLVHADILSRLAPLTTDATLTEPRILKLRLLQHLKCDIEAELKPGVCDWQLLEALHPTPAVGGAPREAALAFIREREPYDRGWYAGACGMLSRETSEFSVAIRSARITAQAITLFAGAGIVAGSEPAAEWAELDNKIANVLSLLG

SEQ ID NO: 93216 - protein, 439 aa, Aeromonas jandaei
  REGION 1..439: note = tr|A0A3N6UV90|A0A3N6UV90_AERJA Isochorismate synthase MenF OS=Aeromonas jandaei OX=650 GN=menF PE=3 SV=1
MLAQTHIKQQLDALRHSKASGFVRLRVTFEIRSFLGWLAAQTLYPRIYWHARGQSSPEYVALGAIQELTAPEDIRQVCSNTAEPHDDSPRYYGGLAFDPTQPGWQGFGACRFVLPRIELVRRGECVSLCLNLWLTGDNLEQELHAAETALDALQPEAPLPPLQKQRWHRHDCPGPERWQTLVERVTAPDFQASTPKVVLSRESVLTSQHDAGQINPWAMLDQWANHAQDCFHFGFQFSPEQAFIACSPERLYRREERHLFTEALAGTIRRSGDEATDEALATELLTDSKNRLENRLVHADILSRLAPLAHDATLTEPRILKLRLLQHLKCDIEAELKPGVCDWQLIDALHPTPAVGGAPREAALAFIREFEPYERGWYAGACGMLSRETSEFSVAIRSARIQPGSVTLFAGAGIVAGSEPAAEWAELDNKIANVLSLLG

SEQ ID NO: 93217 - protein, 446 aa, unidentified
  source 1..446: note = Aeromonas lusitana
  REGION 1..446: note = tr|A0A2M8HD60|A0A2M8HD60_9GAMM Isochorismate synthase MenF OS=Aeromonas lusitana OX=931529 GN=menF PE=3; SV = 1
MLAQTHIKQQLDALRHSTVSGFVRLRVAVEVHSFLGWLAAQTLYPRIYWQARGPARPEYVALGRIHELTRPQDIQRVCDNTGVDSEDSPRYYGGLAFDPTQPGWPDFGPCRFVLPRIELVRRGECVSLCLNLWLPKRERATEFEAELLAAESALDLLQPEAPLPPLHKQDWQREDCPSHAQWQQLVAQVTAPEFQAHTPKVVLSRESRLGADDAQDDQTAISPWSLLAQWAQHAQECFHFGFQFSPQQSFISCSPERLYRREGRHLQTEALAGTIRRAGDDAIDQALAAELLADSKNRLENRLVHADILSRLAPLATRTSLTEPRILKLRLLQHLKCDIEADLKPGVCDWQLLDALHPTPAVGGAPRESALAFIREHEPYDRGWYAGACGMLSRETSEFSVAIRSALIQDGAIRLFAGAGIVAGSEPAAEWAELDNKIANVLSLLG

SEQ ID NO: 93218 - protein, 443 aa, Aeromonas media
  REGION 1..443: note = tr|A0A023RQ71|A0A023RQ71_AERME Isochorismate synthase MenF OS=Aeromonas media WS OX=1208104 GN=menF; PE = 3 SV=1
MLAQTHLKQQLDALRHSTVSGFVRLRVAANVDLFPGWLAAQTLYPRIYWQARGPKSPEYVALGAIHELTRPEDIQRVCDLANTSSEDSPRYYGGLAFDPAQPGWQGFGPCRFVLPRIELVRRGECISLCLNLWLPAQDKVHEFDAELQAAEAALDALQPEAPLPSLQKRSWQRRDVPGPAQWQSLVERVTDPAFQAHTPKVVLSRESLLESEESIPPLCPWSLLTQWARHAQECFHFGFQFSPEQSFIACSPERLYRREHCHLFTEALAGTIRRSGDEATDAALAAELLADSKNRLENRLVHADILSRLAPLTTDATLTEPRILKLRLLQHLKCDIEAELKPGVCDWQLLAALHPTPAVGGAPREAALAFIRESEPYDRGWYAGACGMLSRETSEFSVAIRSARITAQGISLFAGAGIVAGSEPTAEWAELDNKIANVLSLLG

SEQ ID NO: 93219 - protein, 433 aa, Aeromonas molluscorum
  REGION 1..433: note = tr|R1F4P3|R1F4P3_9GAMM Isochorismate synthase MenF; OS = Aeromonas molluscorum 848 OX=1268236 GN=menF PE=3 SV=1
MLTQTHIKQQLDALRHDKACGLVRVRVAMEVDSFLGWLNAQTLYPRIYWHARGDDKPQYVALGCIRELTGPEQIQQIGTHGNQDESPRYYGGLAFDPEQHDWPGFGPCRFVLPRVELIRRGECVSLCLNLWFDEGNREAELTAALSALTALQPEAPLPSLQPQQWQRHDSPDFPQWQRLVATVTAPAFQTLTPKVVLSRESRLEGASVNPWSLLASWALQAEECFQFGFQFEPDEAFIACSPERLYRREQRHLYTEALAGTIRRSGDEMTDAQLAAELLGDGKNRLENRLVHADILQRLAPLTHDASLTEPRVLKLRLLQHLKCDIEAELHPEVSDGQLLAALHPTPAVGGAPREAALRFIRDHEPHARGWYAGACGMLSRETSEFSVAIRSALVRPHAVTLFAGAGIVAGSEPAAEWAELDNKIANVLSLLG

SEQ ID NO: 93220 - protein, 439 aa, unidentified
  source 1..439: note = Aeromonas rivipollensis
  REGION 1..439: note = tr|A0A2P1PBC9|A0A2P1PBC9_9GAMM Isochorismate synthase MenF OS=Aeromonas rivipollensis OX=948519 GN=menF; PE = 3 SV=1
MLAQTHLKQQLDALRHSNVSGFVRLRVAANVDLFPGWLAAQTLYPRIYWQARGPRSPEYVALGAIHELTRPADIQRVCDLANANSEDSPRYYGGLAFDPAQPGWQGFGPCRFVLPRIELVRRGECVSLCLNLWLTDGNLDAELQAAEAALDALQPEAPLPPLQKRPWQRQDVPGQAQWQTLVERVTAPAFQAHTPKVVLSRESVLTGQHGDAPLCPWSLLTQWASHAQECFHFGFQFSPEQSFISCSPERLYRRESGHLFTEALAGTIRRSGDEAADAALAAELLADSKNRLENRLVHADILSRLAPLTTDATLTEPRILKLRLLQHLKCDIEAELKPGVCDWQLLAALHPTPAVGGAPREAALAFIREYEPYQRGWYAGACGMLSRETSEFSVAIRSARITARGISLFAGAGIVAGSEPAAEWAELDNKIANVLSLLG

SEQ ID NO: 93221 - protein, 451 aa, Aeromonas salmonicida
  REGION 1..451: note = tr|T0PI50|T0PI50_AERSA Isochorismate synthase MenF; OS = Aeromonas salmonicida subsp. pectinolytica 34mel; OX = 1324960 GN=menF PE=3 SV=1
MLAQTHIKQQLDALRHSNASGFVRLRVAIEVGSFLGWLAAQTLYPRIYWHARGHDKPEYVALGCIRELTRPQDIQQVCEHANQLHDDSPRYYGGLAFDPAQPGWQGFGPCRFVLPRIELVRRGECVSLCFNLWLPEQQAVAEFDAEMLAAEAALDALLPEAPLSPLLRRDWQRQDCPAQPHWQQLVERVTAPDFQAHTPKVVLSRESRLTLDDARTDATHNAGNAVSPWALLAQWAQHAQDCFHFGFQFSPEQSFIACSPERLYRREQDHLFTEALAGTIRRSGDEATDAALAAELLADSKNRLENRLVHADILSRLAPLTTGASLTEPRILKLRLLQHLKCDIEAELKPGVCDWQLLDALHPTPAVGGAPREAALAFIREFEPHDRGWYAGACGMLSRETSEFSVAIRSARVTAQTITLYAGAGIVAGSEPAAEWAELDNKIANVLSLLG

SEQ ID NO: 93222 - protein, 438 aa, Aeromonas schubertii
  REGION 1..438: note = tr|A0A0W7U4C4|A0A0W7U4C4_9GAMM Isochorismate synthase MenF OS=Aeromonas schubertii OX=652 GN=menF PE=3; SV = 1
MLAPTHLMQQLDALRHEATCGFVRLRVPARVDSFLGWLSSQPLYPRIYWHARGDDRPEYATLGCIREIRDPARLDALCHQTSLSGADSPRYFGGLAFDPDGEGWPGFGPCRLILPRIELVRRGEEVSLCLNLLLDEGEREQEIARAKQALQALCPEHPLTPMQGQGYLRHDTPDFATWHNLVERVTAPDFQAHTPKVVLSRASRLETAHAVDPWQMLESWRARAQGCFHFGFQFEKEQAFISCSPERLYRREGHHLFTEALAGTIRRSGDEAIDAALAHELLSDNKNRLENRLVHADILSRLAPLAQQTSLTEPRILKLRLLQHLKCDIEAELHPGVEDWQLLAALHPTPAVGGAPREAAIDFIRRHEPYRRGWYAGACGMLSRDTSEFSVAIRSALLDANAVTLFAGAGIVAGSEPSAEWAELDNKIDNVLSLLAQD

SEQ ID NO: 93223 - protein, 438 aa, Aeromonas simiae
  REGION 1..438: note = tr|A0A5J6WY95|A0A5J6WY95_9GAMM Isochorismate synthase OS=Aeromonas simiae OX=218936 GN=FE240_15835 PE=4; SV = 1
MLAPTHLLQQLDALRHDATTGFVRLRIPFVVDSFLGWLAAQPLYPRIYWHSRGAERPEYAALGSIHTLDDPQQLTALCKQIAEAGADSPRYFGGLAFDPTSPGWPGFGACRFVLPRIELVRRGEEVSLCLNLCLDASNREAELAAAEQALQALRPAQPLPPLPAQPFVRSDSPDPALWRTLVEQVTAPDFQAHTPKVVLSRASRLDSPIRVAPWSMLAAWRERAHDCFHFGFEFAPEQAFISCSPERLYRREGRHLFTEALAGTIRRSGDDALDAALAAELLADSKNRLENRLVHADILQRLAPLAEQTSLTEPRILKLRLLQHLKCDIEAALKPEVCDWQLLAALHPTPAVGGAPREAALDFIRHHEPYQRGWYAGACGLLSRDTSEFAVGIRSALLDAKSVTLFAGAGIVAGSEPAAEWAELDNKIGNVLSLLEQR

SEQ ID NO: 93224 - protein, 440 aa, Aeromonas sobria
  REGION 1..440: note = tr|A0A2N3J6X5|A0A2N3J6X5_AERSO Isochorismate synthase MenF OS=Aeromonas sobria OX=646 GN=menF PE=3 SV=1
MLAQTHIKQQLDALRHSNVSGFVRLRVAIEIRSFLGWLAAQTLYPRIYWQARGQDRPEYVALGAIHELTEPHAIKRVCANTASQHHDDSPRYYGGLAFDPAQSGWQGFGPCRFVLPRIELVRRGECVSLCLNLWLDDDNLEAELQAAEAALDALRPEAPLPALQKQPWQRQDCPGPAQWQTLVERVTSPDFQAHTPKVVLSRESVLTSPNHDADINPWAMLDQWARHAQDCFHFGFQFSPEQAFIACSPERLYRREGSHLFTEALAGTIRRSGDEEVDAQLAAELLADNKNRLENRLVHADILSRLAPLAHDATLTEPRILKLRLLQHLKCDIEAELKPGVCDWQLLDALHPTPAVGGAPREAALAFIREFEPYDRGWYAGACGMLSRETSEFSVAIRSARIQPGSVTLFAGAGIVAGSEPVAEWAELDNKIANVLSLLG

SEQ ID NO: 93225 - protein, 429 aa, Aeromonas sp.
  REGION 1..429: note = tr|A0A1N7BRI7|A0A1N7BRI7_9GAMM Isochorismate synthase MenF OS=Aeromonas sp. RU39B OX=1907416 GN=menF; PE = 3 SV=1
MQQLDALRHETTCGFVRLREPFRVVSMLGWLSSQPLYPRIYWHARGQDRPEYVALGAVHELTDSHGLNALCERTARTETDSPRYFGGLAFDPTTEGWPGFGPCRMVLPRIELVRRGEDLCLCLNLWLEPGKREAELDAAAGALQQLQPELPLPTLPAVSFERHDTPDFATWQSLVEQVTSAEFQAHTPKVVLSRASRLQTNIALDPWQLLDKWRARAQDCFHFGFQFSPDSAFVSCSPERLYRREARHLFTEAVAGTIRRTGDPHTDHALAAELMADSKNRWENRVVHTDILTRLTPLALHTQQAEPRILQLRLLQHIKCDIEAVLHPDVADWQLLSALHPTPAVGGAPRETALDFIRRFEPYERGWYAGACGLLSRDTCEFSVGIRSALLDAESITLFAGAGIVAGSEPYAEWDELDNKISNALSLLQ

SEQ ID NO: 93226 - protein, 395 aa, Aeromonas taiwanensis
  REGION 1..395: note = tr|A0A5F0K936|A0A5F0K936_9GAMM Isochorismate synthase OS=Aeromonas taiwanensis OX=633417 GN=DRM93_13600; PE = 4 SV=1
MNTHVMDNGAPAEAKMSPDFLFTSGQGTISATDLGQPITTPACEWPLLAQQITLALDAAKAAGQTNPLLIGAFAFDPAEASCLYVPGRYKRGEKLAPTEPTPATEVEQTVEANRVISVQSTPPASEFQASVSAALDAFAQGRLSKVVLSRKLTLTLHQPADPKRVMTRLMAQNPHAFHFSLPLGQGRRLLGASPELLLRVSGGEVFTHPLAGSARRASEPAQDEMVARDLLASRKDQHEHKLVIDEIRRVLTPHCRELAIPSSPSLMSTDTLWHLGTPIAGRLHGGEASVLSLACQLHPTPALCGYPTELARQFIREKEPFRRALFSGIVGWCDSQGNGEWAVVIRCGVLDGRQVELFAGAGIVAGSDPAMEWAETGTKLGTMLKALGLDLEVAQ

SEQ ID NO: 93227 - protein, 440 aa, Aeromonas veronii
  REGION 1..440: note = tr|A0A1N6UB09|A0A1N6UB09_9GAMM Isochorismate synthase MenF OS=Aeromonas veronii OX=654 GN=menF PE=3 SV=1
MLAQTHIKQQLDALRHSNVSGFVRLRVAIEIRSFLGWLAAQTLYPRIYWQARGEARPEYVALGAIHELTEPHAIKQVCTNTANQHHDDSPRYYGGLAFDPAQTGWQGFGPCRFVLPRIELVRRGECVSLCLNLWLDENNLEAELQAAEAALDALRPEAPLPALQKQPWQRQDCPGPAQWQTLVERVTSPDFQTHTPKVVLSRESVLTSPNHDADINPWAMLDQWARHAQDCFHFGFQFSPEQAFIACSPERLYRREDRHLFTEALAGTIRRSGDEEVDAQLAAELLADSKNRLENRLVHADILSRLAPLTHDATLTEPRILKLRLLQHLKCDIEAELKPGVCDWQLLDALHPTPAVGGAPREAALAFIREFEPYDRGWYAGACGMLSRETSEFSVAIRSARIQPGSVTLFAGAGIVAGSEPVAEWAELDNKIANVLSLLG

SEQ ID NO: 93228 - protein, 440 aa, Agarivorans albus
  REGION 1..440: note = tr|R9PLN7|R9PLN7_AGAAL Isochorismate synthase MenF; OS = Agarivorans albus MKT 106 OX=1331007 GN=menF PE=3 SV=1
MRLTASQFQNAINQLRLLPQQGFQQVCIKLPKLDLLAWLNQQQHTTRGYWKNKRQQQVAFVGAAKSVLDLEQLQSVCDQLDPRNNQLRFYGGIAFARQSALWSSFPHRRFILPRFEIRCDGEYTRLFINANFEHQPELEYQRIEKAFAALKPVQALQHTPLKALSRQDQPSREQWQHLVKQVTSEDFQQHTAKVVLSRQTNLQLNAEINAFSLLQQWQQKERNCYSFLFQFDGVTSFLGCSPERLYSREGSQLVSEALAGTAPRGETSELDTQLGEQLLEDAKNKLENQLVVDDLTRRLKELSLHVRTLDNLELLKLDRVQHLKRRIQARISPALDDRSLLQALHPTPAVGGLPRSSAVQYILKNEGYARGWYAGAVGWLSGAQSEFSVAIRSALVTPQHLSTFAGAGIVAGSQAEQEWQELNHKIATVLQLVDKDLLLD

SEQ ID NO: 93229 - protein, 443 aa, Agarivorans sp.
  REGION 1..443: note = tr|A0A4D4ISC1|A0A4D4ISC1_9ALTE Isochorismate synthase MenF OS=Agarivorans sp. Toyoura001 OX=2283141; GN = menF PE=3 SV=1
MRLTASQFKIAINQLRQVPQQGFQQVCIKLPKLDLLAWLNQQQHTTRGYWKNKHKQQVAFVGAAKSILDLEQLQSVCDQLDPSNNQLRFYGGIAFARQSAQWSGFPHRRFILPRFEIRCDGEYTRLFINANFEHQPALEYQRIEKAFLALKPTQALPQVSLKALSRQDQPSRTQWQSLVDQVTSDDFQQHTAKVVLSRQTNIQLNAELNAFALLQQWQQKEQNCYSFLFQFDGISSFLGCSPERLYSREGSQLVSEALAGTAPRGITPEQDAQLGKQLLDDAKNQLENQLVVDDLTRRLKELSLHVRALDQIELVKLDRVQHLKRRIQARVSPALDDRSLLQALHPTPAVGGLPRSSAVQYILKNEGYARGWYAGAVGWLSGAQSEFSVAIRSALVTPQHLSTFAGAGIVAGSQAEQEWQELNHKIATVLQLVDEDALLESEH

SEQ ID NO: 93230 - protein, 434 aa, Aggregatibacter actinomycetemcomitans
  REGION 1..434: note = tr|H0KEM6|H0KEM6_AGGAC Isochorismate synthase MenF; OS = Aggregatibacter actinomycetemcomitans RhAA1 OX=1089447; GN = menF PE=3 SV=1
MDSLQSIKAQLISQIHQLESEQHAISVCSAQIESNVNLLAWLKAQPHYPQCYFKLQQGESAFAATGEVCAFDQLAAAQHFIEHADFSLFGGMTFNGDTYFFLPQLLLEQTQNRLTVKVFIDHADFKESKQQALAVLKTLEKTTALLDVQSEAPRFHQQADQLRWQHWVEQALAQIRSGYVDKLVLANETTFHLNSPLNAQDFLAKSEAHNYGCYHFLLAKSPSSIFLGSTPERLYARHQRRLTTEALAGTALMTDDPAENRQQAQWLLQDGKNIHENQLVAEGICANLSAFAKQIQLGEIGLKPLRRVQHLRREITALLTENCTDLDCLKAIHPTAAVAGLPQQTAKTLLAQIENYDRSWYAGTLGFFNRARAEFCVTIRSAFIEADKIRVFAGAGIVEGSVPLLEWQEIERKAAGLISLLQITESKNGEKKCQ

SEQ ID NO: 93231 - protein, 435 aa, Aggregatibacter aphrophilus
  REGION 1..435: note = tr|A0A3S4PSR4|A0A3S4PSR4_AGGAP Isochorismate synthase MenF OS=Aggregatibacter aphrophilus ATCC 33389; OX = 985008 GN=menF PE=3 SV=1
MDSLQSIKAQLINQINALQFDQNQKIAVCSAQVKCHMNVLGWLKAQQHYPQFYFKLQDTERSFVGVGAVRTFTQLDAAQAFVNQYQLPLFGGMKFYGETYFFLPQILLELDAQQLTVTVFIDQADSANSQLRALEGLKTFEKMTALLDVQVPLTLVNQQADESLWCNWVTRALAEIRQKQVSKLVLANAVTFSAPHRLNGKDFLAKSESYHTGCYHFLLAEDEQGCFLGSTPERLYARQARQLNTEALAGTALVSDNPEHNRAQADWLLQDEKNIYENQLVADGICTNLQPFVDKISVGNVGLKPLRQVQHLRREITALLKAECSDKDCLLAIHPTAAVAGLPQQKAKVLLRQIENYDRGWYAGTLGFFDHQQAEFCVTIRSAQLEENKIRIFAGAGIVEGSVPLLEWHEIERKAAGLISLLQITESKNGEKKCQ

SEQ ID NO: 93232 - protein, 435 aa, Aggregatibacter segnis
  REGION 1..435: note = tr|E6KW32|E6KW32_9PAST Isochorismate synthase MenF; OS = Aggregatibacter segnis ATCC 33393 OX=888057 GN=menF; PE = 3 SV=1
MDSLQSLKTQLINQINALQLNQPHHIAVCSAQAECDVDLLGWLKAQPHYPQFYFQLQQTTQCFATIGAVRRFQQLDAAQDFVNQHNLPLFGGIQFYGQTTFFLPQLVLEQRDNQINVTVFIDQDNLIHNKDKALQVLKTFEKTTALLPLQSQADLIEQQANPTQWANWVEKALAQIHEKTVTKLVLANKSTFALNQPLNAKDFLAQSEIYNKGCYHFLFTQDDKTSFLGSSPERLYARHERHLKTEALAGTAPMSEDHEANRKQADWLLSDKKNIHENQLVADGICANLAPFTKHIEVGNLGIKQLRQVQHLRREITALLTDNCTDLNCLQAIHPTAAVAGLPQQKAKALLQQIEHYDRSWYAGTLGFFNQQQAEFCVAIRSAFVEADKIHVFAGAGIVEGSVPLLEWQEIERKAAGLISLLKITKSENGEQKCQ

SEQ ID NO: 93233 - protein, 435 aa, Aggregatibacter sp.
  REGION 1..435: note = tr|U1SFJ3|U1SFJ3_9PAST Isochorismate synthase MenF; OS = Aggregatibacter sp. oral taxon 458 str. W10330; OX = 1321772 GN=menF PE=3 SV=1
MDSLQSIKTQLISQINALQLNQPHHIAVCSAQAECAVDLLGWLKAQPHYPQFYFQLQQTTQCFATLGAVRTFQQLDAAQDFVNQHNFPLFGGIQFYGQTTFFLPQLVLEQRDNQIQATVFIDQDNLIHNKDKALQVLKTFEKTTALLPLQSQADLIDQQANPTQWASWVEKALAQIHEKTVTKLVLANKSTFALNQPLNAKDFLAQSEIYNKGCYHFLFAQDDKTSFLGSSPERLYARHERHLKTEALAGTSPMNEDHESNRKQADWLLSDKKNIHENQLVADGICANLAPFTQYIEVGNLGIKQLRQVQHLRREITALLTDNCTDLNCLQAIHPTAAVAGLPQQKAKTLLQQIEHYDRSWYAGTLGFFNQQQAEFCVAIRSAFVEADKIHVFAGAGIVEGSVPLLEWQEIERKAAGLISLLKITKSENGEQKCQ

SEQ ID NO: 93234 - protein, 391 aa, unidentified
  source 1..391: note = Agrobacterium deltaense
  REGION 1..391: note = tr|A0A1S7U4N6|A0A1S7U4N6_9RHIZ Isochorismate synthase EntC OS=Agrobacterium deltaense NCPPB 1641; OX = 1183425 GN=entC PE=4 SV=1
MKTGALRTNDVESDEITEFNREFLFTSGSGQLRAKGIREKIAIPARGGEDIASPLQQALAGAFERAQREGQENPIAIGAIPFDVSEPSCLYIPYNYEWNSKDEEPIVADSAMPALVGQNSLPDESGFKHAVEHAIVNFRHSEVRKAVLSVMRELTFASEVNVERLLASLAKQNREGYQFRIPLPDGGDLIGVSPELLIRKQGEKIISNPLAGSAKRMVDPAADKANADRLSASEKDHYEHSLVIEDIRSLLSPVCAELDVPEKPSLINTAALWHLSTRIEGRLADPETNALQLACLLHPTPAVCGFPTERAHRLIRFVEPFERGLFTGMVGWTDSQGNGEWVVTIRCGTVQRETVRLFAGAGIVEASEPESEWAEVQTKLKTMLNACGLAA

SEQ ID NO: 93235 - protein, 391 aa, unidentified
  source 1..391: note = Agrobacterium genomosp.
  REGION 1..391: note = tr|A0A1S7N8Y4|A0A1S7N8Y4_9RHIZ Isochorismate synthase EntC OS=Agrobacterium genomosp. 1 str. TT111; OX = 1183430 GN=entC PE=4 SV=1
MKTGALRTNDVDSDEITDFDREFLFTSGSGELRARGIRERITIPAHGAEDAGSPLQKAIKAAFERARRAGQDNPIAIGAIPFDVNEPSCLYIPNNHESNPKGAASISTDSAMPALVGQNSLPDENGFKRAVEHAIVNFRHSDVRKAVLSVMRELTFASEVNVERLLASLAKQNREGYQFRIPLPDGGDLIGVSPELLIRKQGEKVISNPLAGSAKRMADPVADKANADRLSASEKDHYEHSLVIEDIRSLLTPCCTEIDVPEKPSLINTAALWHLSTRIEGRLADPETNALQLACLLHPTPAVCGFPTERARRLIRFVEPFERGLFTGMVGWTDAEGNGEWVVTIRCGTVQRQTVRLFAGAGIVEASEPESEWAEVQTKLKTMLNACGLSA

SEQ ID NO: 93236 - protein, 391 aa, unidentified
  source 1..391: note = Agrobacterium rhizogenes
  REGION 1..391: note = tr|A0A546XAP7|A0A546XAP7_AGRRH Isochorismate synthase OS=Agrobacterium rhizogenes OX=359 GN=EXN68_22005; PE = 4 SV=1
MKTGALRTNDVESDEITDFNREFLFTSGTGQLRAEGIRERITLPARGGEDTASPLQQAIKGAFERARRAGQDNPIAIGAIPFDVSEPSCLYVPNNHEWSPRDAVPVATDSAMPALVGQNSLPDEAGFKHAVEHAILNFRHSEVRKAVLSVMRELTFASEVNVERLLASLAKQNREGYQFRIPLPEGGDLIGVSPELLIRKQGEKIISNPLAGSAKRMTDPVADKANADRLSESEKDHYEHSLVIEDIRSLLSPCCAELDVPEKPSLINTAALWHLSTRIEGRLADPETNALQLACLLHPTPAVCGFPTERAHRLIRFVEPFERGLFTGMVGWTDAQGNGEWVVTIRCGTVQHQTVRLFAGAGIVEASEPESEWAEVQTKLKTMLNACGLSA

SEQ ID NO: 93237 - protein, 391 aa, unidentified
  source 1..391: note = Agrobacterium salinitolerans
  REGION 1..391: note = tr|A0A546WM67|A0A546WM67_9RHIZ Isochorismate synthase OS=Agrobacterium salinitolerans OX=1183413; GN = EXN23_14845 PE=4 SV=1
MKTGALRTNDVESDEITEFNREFLFTSGSGQLRAKGIREKIAIPARGGEDIASPLQQALAGAFERAQREGEQNPIAIGAIPFDVSEPSCLYIPYNHEWNSKDAEPIVADSAMPALVGQNSLPDESGFKRAVEHAIVNFRHSEVRKAVLSVMRELTFASEVNVERLLASLAKQNREGYQFRIPLPDGGDLIGVSPELLIRKQGENIISNPLAGSAKRMVDPAADKANADRLSASEKDHYEHSLVIEDIRSLLSPVCAELDVPEKPSLISTAALWHLSTRIEGRLADPVTNALQLACLLHPTPAVCGFPTERAHRLIRFVEPFERGLFTGMVGWTDSEGNGEWVVTIRCGTVQRETVRLFAGAGIVEASEPESEWAEVQTKLKTMLNACGLSA

SEQ ID NO: 93238 - protein, 391 aa, unidentified
  source 1..391: note = Agrobacterium sp.
  REGION 1..391: note = tr|A0A427QJ03|A0A427QJ03_9RHIZ Isochorismate synthase OS=Agrobacterium sp. FDAARGOS_525 OX=2420311; GN = EGT36_25500 PE=4 SV=1
MKTGALRTNDVESDEIADFNRDFLFTSGTGQLRAKGIRERITLPARGGEDTGSPLQQAIKAAFERARRAGQDNPIAIGAIPFDVSEPSCLYIPNNHEWSPRETAPVVADSAMPALVGHNSLPDETGFKRAVEHAIVNFRHSDVRKAVLSVMRELTFASEVNVERLLASLAKQNREGYQFRIPLPDGGDLIGVSPELLIRKQGENIISNPLAGSAKRMVDPAADKANAERLSASEKDHYEHSLVIEDIRSLLSPVCAELDVPEKPSLINTAALWHLSTRIEGRLADPETNALQLACLLHPTPAVCGFPTERAHRLIRFVEPFERGLFTGMVGWTDSEGNGEWVVTIRCGTVQRKTVRLFAGAGIVEASEPESEWAEVQTKLKTMLNACGLSA

SEQ ID NO: 93239 - protein, 391 aa, unidentified
  source 1..391: note = Agrobacterium tumefaciens
  REGION 1..391: note = tr|A0A1S7QIB7|A0A1S7QIB7_RHIRD Isochorismate synthase entC OS=Agrobacterium tumefaciens str. CFBP 5621; OX = 1183422 GN=entC PE=4 SV=1
MKTGALRTNDVESDEITEFNREFLFTSGSGQLRARGIRERIAIPARGGEDISSPLQQALAGAFERARRDGEQNPIAIGAIPFDVSEPSCLYIPYNHEWNSRDAAPIVADSAMPALIGQNSLPDETGFKRAVEHAIVNFRHSEVRKAVLSVMRELTFASEVDVERLLASLAKQNREGYQFRIPLPDGGDLIGVSPELLIRKQGEKIISNPLAGSAKRMVDPAADKANADRLSASEKDHYEHSLVIEDIRSLLSPVCVELDVPEKPSLINTAALWHLSTRIEGRLADPETNALQLACLLHPTPAVCGFPTERAHRLIRFVEPFERGLFTGMVGWTDSEGNGEWVVTIRCGTVQRETVRLFAGAGIVEASEPESEWAEVQTKLKTMLNACGLSA

SEQ ID NO: 93240 - protein, 418 aa, Agrococcus casei
  REGION 1..418: note = tr|A0A1R4G9S6|A0A1R4G9S6_9MICO Menaquinone-specific isochorismate synthase OS=Agrococcus casei LMG 22410; OX = 1255656 GN=CZ674_10200 PE=4 SV=1
MHTPVALTARTEPFTGSAPLRYSDARNPLAFLKGDEGIVGIGETLRLTFTGRSRFADAAAAWAAICASATVDDPMQLPGTGLVAFGAFAFDDESQAESVLVIPQAVIGESGDDRWVTRITLDQEDSSAPLPDLLAETDIDEMRVDFTHGRISGAAYEGAVVGALEQIRTADVSKLVIARDLEGRLPAGGDLRSVIRGLRRRYPTAMAYAVDGLIGASPETLVRVRGGDLFTRVLAGTAARGATKPLDAEAAESLSASGKNSREHALAVESALASLAEVGVEPAESEPFTLQLPNLWHLATDITGSIGDATVFEVMDALHPTAAVGGTPTAEALPRIRRIEGLDRMRYAGPVGWVDAAGNATWAIALRGAEVAANGTIRAFAGAGIVEGSDPAAELRETEIKFRPIRDAFADPLPEDAS

SEQ ID NO: 93241 - protein, 403 aa, Agrococcus lahaulensis
  REGION 1..403: note = tr|A0A443JZX6|A0A443JZX6_9MICO Isochorismate synthase OS=Agrococcus lahaulensis OX=341722; GN = D8Y24_00470 PE=4 SV=1
MPGLRVRTERAELGRLLEHADPRAPLAIRRGADGIVGRGEALRLEFSGPSRLSDAADAWRRVAEDAVVDDAVGVPGTGLVAFGAFAFDDDSAAASVLIVPQVVVGRRGDDEWITWIGDEGRLHPTAVDEVRVELTDGAIDAERYRAVVAEATERIRSGEAEKLVVARDRVGQLPPDGDVRSVAVGLVQRYPDAVTYAVDGLVGASPETLVAAHRGHFFSRVLAGTAARGATPARDAEIAEALASGDKDLREHRFAADSAMAVLRELAPDARASEPFPLRLPNLWHLATDITGTLGEGRSTLDVLALLHPTAAVAGTPRAASLRIIRELEGVDRGRYAGPVGWVDGYGGGEWVIALRGAEIAPDGAIRAFAGAGIVAGSDPAAELAETAVKLRPITDALADPLP

SEQ ID NO: 93242 - protein, 430 aa, Agromyces albus
  REGION 1..430: note = tr|A0A4V1QYC6|A0A4V1QYC6_9MICO Isochorismate synthase OS=Agromyces albus OX=205332 GN=ESP51_02460 PE=4; SV = 1
MNHTDAPPRHAAPARLVVRTEPVDELAPLIPRADPRHPLLWMRRGEGIVGLGETLRIESSGATRVEDAAAAWTELSALADIDDRVGLPGTGLVAFGAFAFADESEATSVLVVPELVLGRRDGRAWVTRISLATGDDEAADAAASVPLEIPEPTPKRRVPRVTFAPGSVPPAEYEAAVAEAVRRIDAGELEKVVLARQLVGELHEEDGLRATINRLAEDYPDTWVFAVDGLIGASPETLVRVDHGTVSARVLAGTTSRGAGEASDRERAVALAASAKDRAEHALAVASAVKRLAPHTARLDTSPEPFTLQLPNLWHLATDLKGTLGDGSSALDLVRAVHPTAAVAGTPRRVALPVIAELEGFDRGRYAGPVGWIDGDGDGEWAIALRCAQVDGDGTVTAYAGCGIVHDSVPADELAETVMKFRPIVEAFGG

SEQ ID NO: 93243 - protein, 373 aa, Agromyces atrinae
  REGION 1..373: note = tr|A0A4Q2M9I6|A0A4Q2M9I6_9MICO Isochorismate synthase OS=Agromyces atrinae OX=592376 GN=ESP50_07085; PE = 4 SV=1
MAGIGEVLRLEFSGPNRVSDAASAWRELVGEASIVDQVGVPGTGLIAFGTFAFADDSAETSVLIVPRVVVGHRGNRSWVTLVHAEGEPAASVEVAQRAFGDEFRVRLVPGELPPAAYQDAVAQAVARIDAGELSKVVLARQIRGHVSPDADIRRVLDHLSRGYPDTWTFAVDGLVGSSPETLVRVADGAVSARVLAGTASRGVDAAADRGNAEALTHSEKDAEEHALAVRSAVDALEPHTSTLEASAEPFTVKLPNLWHLATDLEGTVDDGSGALDLVAAIHPTAAVAGTPREAAVRVLAELEGFDRGRYAAPVGWIGADGDGEWAIALRCAHVSPEGEITAWAGCGIVHDSDPAAELAETVMKFRPIVDAFG

SEQ ID NO: 93244 - protein, 293 aa, unidentified
  source 1..293: note = Agromyces binzhouensis
  REGION 1..293: note = tr|A0A4Q2J7F0|A0A4Q2J7F0_9MICO Isochorismate synthase (Fragment) OS=Agromyces binzhouensis OX=1817495; GN = ESO86_17770 PE=4 SV=1
PVELPAPAPKRDVPRVRFAPGALPPEAYTDAVAEAVRRIDDGRFEKVVLAREIVGTLHEDAGLRAALAKLADDYPDTWVFAVDGLIGASPETLVRVDHGTVSARVLAGTASRGQDAASDRDQAARLAASHKDLAEHALAVESAVATLAPHTARLDASPEPFTLQLPNLWHLATDLKGTLGDGSSALDLVRAVHPTAAVAGTPRNVALAAITELEGFDRGRYAGPVGWVDADGDGEWAIALRCAQVSTDGTVRAYAGCGIVHDSVPVDELAETDMKFRPIVEAFGAPPPSPPVP

SEQ ID NO: 93245 - protein, 399 aa, Agromyces fucosus
  REGION 1..399: note = tr|A0A4Q2JRI3|A0A4Q2JRI3_9MICO Isochorismate synthase OS=Agromyces fucosus OX=41985 GN=ESP57_08725 PE=4; SV = 1
MRRGEGIVGLGEVVRIETTGATRVEDAAAAWTSLAALAEIDDRVGLPGTGLVAFGAFAFADESEATSVLIVPELVMGRRDGRSWVTRITLDPADEVTDASGSADDAELEVVLPEPAPKRQVPRVAFTPGSMPPEAYETAVAEAVRRIDAGELEKAGRLEKVVLARQLVGELHEDAGLRATINRLAEDYPDTWVFAVDGLIGASPETLVRVDHGTVSARVLAGTASRGAGEASDRERALTLAASEKDRAEHALAVESAVKRLAPHTARLDTSPEPFTLQLPNLWHLATDLKGTLGDGSSSLDLVRAVHPTAAVAGTPRRIALPAIAELEGFDRGRYAGPVGWIDGGGDGEWAIALRCAQVDSDGTVTAYAGCGIVHDSVPADELAETVMKFRPIVEAFGG

SEQ ID NO: 93246 - protein, 415 aa, Agromyces sp.
  REGION 1..415: note = tr|A0A4P6FFX5|A0A4P6FFX5_9MICO Isochorismate synthase OS=Agromyces sp. FW100M-8 OX=2509455; GN = ET445_01860 PE=4 SV=1
MRTVAVDETEPLIPRADPRNPLVWLRRGEGVVGLGEVLRIESSGPTRVEDAAAAWTELAAHADVDDRVGLPGTGLVAFGAFAFADESAATSVLLVPEIVMGRRDGRAWVTRISLATGDDEAQDVSDEASEDPVIPEPAPRRKVPRVTFAPGSVTPDAYEAAVAEAVRRIDAGDLSKVVLARQLVGELHEDDGLRATINRLAEDYPDTWVFAVDGLIGASPETLVRVDHGQVSARVLAGTTARGAGEASDRERAAQLLESPKNREEHALAVASAVSTLEPHTARLDASPEPFTLQLPNLWHLATDLKGTLGDGSTALDLVRAVHPTAAVAGTPRKVALATLAELEGFDRGRYAGPVGWVDGDGDGEWAIALRCAQVDADGTVTAYAGCGIVHDSAPAAELAETVMKFQPIVEAFGG

SEQ ID NO: 93247 - protein, 168 aa, unidentified
  source 1..168: note = Alcaligenaceae bacterium
  REGION 1..168: note = tr|A0A4V1VCZ1|A0A4V1VCZ1_9BURK Isochorismate synthase (Fragment) OS=Alcaligenaceae bacterium OX=2021368; GN = EON54_10760 PE=4 SV=1
ALMESDKDLKEHAIVIDAIASVLRPLCRTLNVPTRPSLVATDALWHLSTRIEGELIDPATTSLDLAFALHPTPAVCGYPTELARQAINRLEPFDRGFFAGFVGWMDAAGDGEWAVSLRCATCGPSEATLYAGAGIVPGSVPQRETAETQTKFRTMLSALGLGQSIEQR

SEQ ID NO: 93248 - protein, 401 aa, Alcaligenes aquatilis
  REGION 1..401: note = tr|A0A3R9B763|A0A3R9B763_9BURK Isochorismate synthase OS=Alcaligenes aquatilis OX=323284 GN=EGK70_09065; PE = 4 SV=1
MNSRIADQVRPATIEEWLRHYRADSSVFASPTVSLMAHGTALERHTHNAQGQLLSDAQTLLSQAAQQGLDAPLLLGVIPFNPAREAYLRVPKEYRRDPVLLRPVQRPPLAKSGNSIASQSLLPNGAGYEDSVSRILATMREQNISKTVMARTVTITLNEALDRQTVLSNMLHSNPAGYTYALPLPGGKAQDPDLFFGASPELLVRRQGDLVTVNPLAGTAPRFADPQRDQASAETLMASSKDLREHAYVIQDVVRILSQFCDCLDVPDGPSLTSTANLWHLSTRISGRLRDPSVTSLELALAMHPTPAVCGLPTQPAMQAIEATEVFDRGYFAGAIGWNDHEGNGEWAVAIRCGHYTRQNLTLSAGAGIVDGSVPALERQETGNKLMTLINSLGLAQNITL

SEQ ID NO: 93249 - protein, 401 aa, Alcaligenes faecalis
  REGION 1..401: note = tr|A0A411T0Y5|A0A411T0Y5_ALCFA Isochorismate synthase OS=Alcaligenes faecalis OX=511 GN=EYC51_09870; PE = 4 SV=1
MNSRIADHVRPATIEEWLQHYQADSSVFASPTVSLMAHGTALERHTHNAQGQLLSDAQGLLSEAAQQGLHAPLLLGVIPFNPARNAYMRVPTTYQRDPVLRRPVQRPPLARSRNTIASQQLLPDGQGYEDSVSHILATMREQNISKTVMARTVTITLNEALDRQTVLSNMLHSNPAGYTYALPLPGGAAHDPDLFFGASPELLVRRQGDLVTVNPLAGTAPRFADPQRDQASAQTLMASSKDRREHAYVIQDVVRILSRFCDTLDVPEGPSLTSTANLWHLSTRISGRLRDPGVSSLELALAMHPTPAVCGLPTQPAMQAIEATEVFDRGYFAGAIGWNDHEGNGEWAVAIRCGHYTQQGLTLSAGAGIVEGSVPALERQETGNKLMTLINSLGLAQNIAL

SEQ ID NO: 93250 - protein, 373 aa, Algibacter lectus
  REGION 1..373: note = tr|A0A090X2C4|A0A090X2C4_9FLAO Isochorismate synthase OS=Algibacter lectus OX=221126 GN=JCM19274_4023; PE = 4 SV=1
MTFNEFLERIDTQYNAQLPFVIYRKPNESAVNGLLQETNDLVYTEDFTEKGFVFSPFDNTEKSVLMPLELSDKLKSLVPESTAIDSIESSSKVDNTLQKEVHIKLVERGVEAIKNNQFKKVVLSRTESVSLSENNPIAIFNNLLQNYASAFVYCWYHPKVGLWLGATPETLVKIEGQRFSIMALAGTQNYKGSLDVTWQAKELQEQQYVTDFILDSIATTIDNINVSKIETVKAGNLLHLKTRIWGVLKPNAISLKDLLYSLHPTPAVCGLPKEAAKQFILEEEHYNRGFYTGFLGELNLEITSAPRSGKRNIENRAYATTKKSTQLYVNLRCMQLKENKAIVYVGGGITESSNPENEWEETVSKSLVIKKVL

SEQ ID NO: 93251 - protein, 405 aa, Algoriphagus sp.
  REGION 1..405: note = tr|A0A418PR63|A0A418PR63_9BACT Isochorismate synthase OS=Algoriphagus sp. N3 OX=2056311 GN=D0X99_11640; PE = 4 SV=1
MNATENPITTTQSEVLDLLFLKGLTSGGSFAVWRKPRTTKLEFLLDDKKNPERVTLNFEELPAGFLVHPFADQEDKKAFFIRSSHYFSFDLDQDLDQEDLPKWLNQSLDPEAGSIRSEISHLIQIKSESSLQENLKGNEKEHFIRLVEHGIKAIEDGILEKVVPARTKFIHLSEDFDLGKTFSNLLKSYPNSFINFFHIPQVGTWIGASPEVLIETKGDHFHTMALAGTQPAIGENPLKSAGWTQKEIEEQALVCRYIVDCFKKIRLREYEEHGPKTIMAGNLLHLRTDFRVNMKATGFPQLGSVMLELLHPTSAVCGMPRKEAHDFLQENEGFDRSFYAGFLGPVNIQDETSIYVNLRTASIRGDKAILYAGAGVTEESDPEKEWEETELKCQIIGKFIQKPNT

SEQ ID NO: 93252 - protein, 434 aa, unidentified
  source 1..434: note = Aliikangiella sp.
  REGION 1..434: note = tr|A0A545UCB2|A0A545UCB2_9GAMM Isochorismate synthase OS=Aliikangiella sp. M105 OX=2592383; GN = FLL46_15005 PE=4 SV=1
MLSYDGESLDSSENSNILEEFREGESFFFRSEEFAFLTSGTLVKVPDTNLTCQSFEQTVMRTFEQAKHLMSNKTASIEPPLVVGAIPFDRTKPVNLRIPKSVKRFDPQTRLSVDAVEATHSLSSVKEVVSNWTTTHMRSVPNGDAYKQSVSQALDLFAKTELDKVVLARTLEIGCDQELPVSKLIARLAQSNPNGFIFAADSSLNQLSPRTLFGASPELLISKKGAKVFSNPLAGSAARSTSVTEDCNRAEALLRSTKDLHEHALVIESIVDTLSPYCKKLHLPGKPSLLKTPTMWHLSTLIQGELKDSETSSLSLAKALHPTPAVCGNPTVMARETISRLEHIERGFFTGTVGWSDINGDGEWSVTIRCAEKQAQLLKLYAGAGIVEGSLPDLELAETAAKFGTMLNALGISYSDAINYSDMGMSTSTKTKVA

SEQ ID NO: 93253 - protein, 440 aa, Aliivibrio finisterrensis
  REGION 1..440: note = tr|A0A4V1Z8U7|A0A4V1Z8U7_9GAMM Isochorismate synthase MenF OS=Aliivibrio finisterrensis OX=511998; GN = menF PE=3 SV=1
MSTFQNAIESIRHQITQATSRHTICLELDWSIGDQLIDWLEAQPVFPKFYWQSRDGQEEVAVIGQVKTFTDPSAAQKVLAPKQRIWGGRSFDGRTERNRRCMSSFFFLPQVEISRLVSSWQIMVNLSDDNSRLLSTLDKLVEHFSSLSELHCRVTQRINTPEKSDWTNMVNKALTAISNQQFEKVVLARKTTLTLDQTLSSAQFLKASRKANSHSFHFMMALDSEHCFIGSTPERLYVRNGYALKTEALAGTIGRGHDEEEDNQLASWLIADKKNQYENRLVVDDIINRLSKFSLSMTVAESSELVKLRKVQHLKRPISAEINAECCDSQLLDNLQPTAAIAGLPRMSALDFIIDNEPFARGWYSGAVGFLSQQRSEFCVAIRSALVMGNKLHLFAGAGIVPGSEPSSEWEELDKKTSTLCTLLESDPAVSAEIKESQVA

SEQ ID NO: 93254 - protein, 440 aa, Aliivibrio fischeri
  REGION 1..440: note = tr|Q5E479|Q5E479_ALIF1 Isochorismate synthase MenF; OS = Aliivibrio fischeri (strain ATCC 700601 / ES114); OX = 312309 GN=menF PE=3 SV=1
MSTFQDAIESIRHQITQATTSHTISLKLDWSIGEQLIDWLEAQPVFPKFYWQSRDGEEEVAVLGQVKTFTDPSAAQKVLAPQQRIWGGRSFDGRTERNRRCMSSFFFLPQVEITRLGSSWNIMVNVSEDNSRLLSTLNKMTEEFDDLSELHCRVTQRINTPEKADWSNMVNKALTAIENKQFEKVVLARKTTLTLDLNLSSAQFLKASRQSNSHSFHFMMALDSEHCFIGSTPERLYVRNGYALKTEALAGTIGRGHDEEEDNQLASWLISDKKNQYENRLVVDDIVHRLSKFSISMNVADTSELVKLRKVQHLKRPISAEINAECSDSQLLDNLQPTAAIAGLPRMSALDFIIDNEPFARGWYSGAVGFLSQQRSEFCVAIRSALVMGNKLHLFAGAGIVPGSEPSSEWDELDRKTSTLCTLLESDTNVSSDITESQVA

SEQ ID NO: 93255 - protein, 440 aa, Aliivibrio logei
  REGION 1..440: note = tr|A0A1B9NU64|A0A1B9NU64_ALILO Isochorismate synthase MenF OS=Aliivibrio logei OX=688 GN=menF PE=3 SV=1
MSTFQDAIESIRHQIAQATSSHTICIDLDWAVGDQLIDWLEAQPIYPKFYWQSRDGEEEVAVLGQVKTFTDPKAAQQILAPQQRVWGGRSFDGRTERNRRCMSSFFFLPKVEITRLKSSWHFMVNLSDDNSRLLSTLDKLSEQFTSLSELHCRVQQRINTPEKEDWSNMVNKALTAISNKKFEKVVLARKTTLTLDQPLSSAQFLKASRKANSHSFHFMMALDSEHCFIGSTPERLYVRNGYALKTEALAGTIGRGHDEEEDDQLASWLISDKKNQYENRLVVDDIVNRLSKFSLSMKVAEKSELVKLRKVQHLKRPISAEINQECSDSQLLDNLQPTAAIAGLPRMSALDFIIDNEPFARGWYSGAVGFLSQQRSEFCVAIRSALVMGNKLHLFAGAGIVPGSEPSSEWDELDRKTSTLCTLLESDITMNPEITESQVA

SEQ ID NO: 93256 - protein, 440 aa, Aliivibrio salmonicida
  REGION 1..440: note = tr|B6EJ55|B6EJ55_ALISL Isochorismate synthase MenF; OS = Aliivibrio salmonicida (strain LFI1238) OX=316275; GN = menF PE=3 SV=1
MSTFQDAIESIRHQIAQATSSHTICIDLDWTVGDQLIDWLEAQPIYPKFYWQSRDGEEEVAVLGQVKTFTDPKAAQQILAPQQRVWGGRSFDGRTERNRRCMSSFFFLPKVEITRLKSSWHFMVNLSDDNSRLLSTLDKLSEQFTPLSELHCRVQQRINTPEKEDWSNMVNKALTAISNKQFEKVVLARKTTLTLDQPLSSAQFLKASRKANSHSFHFMMALDSEHCFIGSTPERLYVRNGYALKTEALAGTIGRGHDEEEDDQLASWLISDKKNQYENRLVVDDIVNRLSKFSLSMKVAEKSELVKLRKVQHLKRPISAEINQECSDSQLLDNLQPTAAIAGLPRMPALDFIIDNEPFARGWYSGAVGFLSQQRSEFCVAIRSALVMGNKLHLFAGAGIVPGSEPSSEWDELDRKTSTLCTLLESDITMNPEITESQVA

SEQ ID NO: 93257 - protein, 440 aa, Aliivibrio sifiae
  REGION 1..440: note = tr|A0A2S7XH52|A0A2S7XH52_9GAMM Isochorismate synthase MenF OS=Aliivibrio sifiae OX=566293 GN=menF PE=3; SV = 1
MSTFQNAIESIRHQIAQATSSHTICLELDWSVGDQLIDWLEAQPIYPKFYWQSRDGQEEVAVLGQVKTFTDPSAAQKVLAPQQRIWGGRSFDGRTERNRRCMSSFFFLPQVEISRLASSWQFMVNLSEDNSRLLSTLNKLVENFTSLSELHCRVTQRINTPEKADWTNMVNKALTAISNQQFEKVVLARKTTLTLDQNLSSAQFLKASRKANSHSFHFMMALDSEHCFIGSTPERLYVRNGYALKTEALAGTIGRGHDEEEDNQLASWLISDKKNQYENRLVVDDIVNRLSKFSLSMNVAETSELVKLRKVQHLKRPISAEINSDCSDSQLLDNLQPTAAIAGLPRMSALDFIIDNEPFARGWYSGAVGFLSQQRSEFCVAIRSALVMGNKLHLFAGAGIVPGSEPSSEWEELDRKTSTLCTLLESDISMNSDITESQVA

SEQ ID NO: 93258 - protein, 440 aa, Aliivibrio sp.
  REGION 1..440: note = tr|A0A1B9PRI8|A0A1B9PRI8_9GAMM Isochorismate synthase MenF OS=Aliivibrio sp. 1S175 OX=1840087 GN=menF; PE = 3 SV=1
MSTFQDAIESIRHQIAQAVSSQTICIHLDWSVGDQLIDWLEAQPIYPKFYWQSRDGEEEVAVLGQVKTFSDPKVAQQILAPQQRVWGGRSFDGRTERNRRCMQSFFFLPQVEISRLASSWQIMVNLSEDNSRLLLTLNKLVENFASLSELHCRVTQRINTPEKGDWTNMVNKALTAISNKQFEKVVLARKTTLTLDQNLSSAQFLKASRKANSHSFHFMMALDSEHCFIGSTPERLYERNGYALKTEALAGTIGRGHDEEEDNQLASWLISDKKNQYENRLVVDDIVNRLSKFSLSMNVAETSELVKLRKVQHLKRPISAEINNDCSDSQLLDNLQPTAAIAGLPRMSALDFIIDNEPFARGWYSGAVGFLSQQRSEFCVAIRSALVMGNKLHLFAGAGIVPGSEPSCEWEELDRKTSTLCSLLESDISINSDITESQVA

SEQ ID NO: 93259 - protein, 440 aa, Aliivibrio wodanis
  REGION 1..440: note = tr|A0A090IMZ4|A0A090IMZ4_9GAMM Isochorismate synthase MenF OS=Aliivibrio wodanis OX=80852 GN=menF PE=3; SV = 1
MSTFQNAIESIRHQITQATSSHSICLELDWSIGDQLIDWLEAQPVYPKFYWQSRDGQEEVAVVGQVKTFTDPSAAQKVLAPQQRIWGGRSFDGRTERNRRCMSSFFFLPQVEISRLASSWQIMVNLSDDNSRLLSTLDKLVEHFSSLSELHCRVTQRINTPEKADWTNMVNKALTAISNKQFEKVVLARKTTLTLDQDLSSAQFLKASRKANSHSFHFMMALDSEHCFIGSTPERLYVRNGYALKTEALAGTIGRGHDEEEDNQLASWLISDKKNQYENRLVVDDIINRLSKFSLSMKVAETSELVKLRKVQHLKRPISAEINSDCCDSQLLDNLQPTAAIAGLPRMSALDFIIDNEPFARGWYSGAVGFLSQQRSEFCVAIRSALVMGNKLHLFAGAGIVPGSEPSSEWEELDKKTSTLCTLLESDPTVSVEVKESQVA

SEQ ID NO: 93260 - protein, 467 aa, Alkalibacillus haloalkaliphilus
  REGION 1..467: note = tr|A0A511W7G7|A0A511W7G7_9BACI Isochorismate synthase MenF OS=Alkalibacillus haloalkaliphilus OX=94136; GN = menF PE=3 SV=1
MLTIERLSINEKLNEALSHIDEQGRFLSLTIDVHSINSIDYFASRTDLKGERFYWSSANGEITFVGLGYANQFYSTDSAERYQTIEQALEDQKQQMVHLQDEQITGTGAVYFGGFSFFNERHHSEWHDFPVNQFVLPKRLLTVKNDEQYLSLNLWIEPSDSLDDVSTMIQAELDQINAVQPIEKNTMNFTQINDELTYDQWESLINNAVEEITDGKLDKVVLAREVEALFEEQIPVEQVLNALLEQQERSYIFVMENNNQAFIGATPERLVEVNRGELQSACLAGTTSRGQTVDEDEWKALELLKDDKNLEEHQYVVKMIKDSVSPLCDTLSIPSQPMIRKLSKIQHLFTPVSGSLKESVTIFDALKALHPTPALGGEPRQEAMNFIQRNEPLERGWYAAPIGWIDEELNGEFAVAIRSALLTGHKARLFAGCGIVSDSDPKAEYDETNLKFSPMLGALGGYIDDHE

SEQ ID NO: 93261 - protein, 388 aa, Alloactinosynnema sp.
  REGION 1..388: note = tr|A0A0H5D942|A0A0H5D942_9PSEU Isochorismate synthase of siderophore biosynthesis OS=Alloactinosynnema sp. L-07 OX=1653480 PE=4 SV=1
MRAAGHDGGVAGDDAGPRTLVERYRPGDFLLAGPASTLLATGCQAVVTESHAEELAARVGKLILDSGVPVAVGVLPFDDTLDPRLVIPAEVLSAGPAHGLVPAAVPHTVAASVTPVPEPAAYARAVAATVADLRTDPDLRKVVLARAVDLGFADPVDIAALLPGLIEANPLGYTYAADLDAGRTLLGASPELLLRRTGTTVLSNPLAGSVPRVADPAADRAVGEALLASAKDQGEHRVVVEAVVETLRPFCRNLTVPPTPSLVETPSVWHLSTRITGELIDPDVSALRLAAALHPTPAVCGTPAAAARAAIAHHEPFDRGFYSGVVGWCDAAGDGEWIVAIRCAEVDDRRMRLFAGAGIMPDSVPESELAETTAKFHTLLAALGMRLN

SEQ ID NO: 93262 - protein, 471 aa, Allobacillus sp.
  REGION 1..471: note = tr|A0A556PBR8|A0A556PBR8_9BACI Isochorismate synthase MenF OS=Allobacillus sp. SKP4-8 OX=1955272; GN = menF PE=3 SV=1
MRTSGGICMIQTEKISVHDQLHQATANLINQTQIEVSLVEPINEISALEFFKKTQLLGDRIFWKNPTGDMQIAGVGAHKRLKPKNGEDRFQSIREQWEAYLETCSLPDESVTGTGPILFGGFSFMDHIDQTDDTWEAFASGEMILAKWMLTEQDGQTYLTHHATIDETTNVNEIANRFTEMKKVLSKPIMEEALPKMQSMNDQFTYEHWETLLNEAIDTIREQALEKVVLARKTDVLFDHKIPLAEVIERMIDKQTNSYVFVIEQENDAFIGATPERLVQVKGNELLSACLAGTTARGKTEDDDEMLAWQLLNDKKNREEHDYVVQMIKQSVAPYVESFDIPDTPVIYPLKSLQHLFTPVTATLKNDATILELVKQLHPTPALGGEPRDKALQFIDEKEPFDRGWYAGPIGWLDANFDGEFAVAIRSGLITENQATLFAGCGVVKDSDPQAEYEETRIKFIPMLDALGGTQ

SEQ ID NO: 93263 - protein, 346 aa, unidentified
  source 1..346: note = Alloprevotella sp.
  REGION 1..346: note = tr|A0A496KWF6|A0A496KWF6_9BACT Isochorismate synthase OS=Alloprevotella sp. OX=1872471 GN=D8H91_01165; PE = 4 SV=1
MLASVRYRLPGETLVHEIGTKHPPKRCTSLAEIPPQKGYLFAPFQENDAHPLWFFPADEQRTWTQPTEVPSFSLAYEVEEDHRTEYMRAFEACQAAFQQSELQKVVLSRTLSVHFDQNLTKDDYYRLFEQACIAYPNSFVSLISLPAPWGTWLMATPEILISAKDNLWHTMALAGTMEKTADSSLSLEVWSEKNRKEQQWVVDYISRQLEKLGCEYQKSPTYVRPAAHLLHLCTDFSVIPPKEKSIACVIEALHPTPAVCGWETSTAQALISKVESHDRSYYSGYSGPIDPNSAHLFVTLRCMNLNNDTATLYAGGGLLPESNENSEWQETERKLNTMLRLFSAHK

SEQ ID NO: 93264 - protein, 409 aa, Altererythrobacter sp.
  REGION 1..409: note = tr|A0A420EA86|A0A420EA86_9SPHN Isochorismate synthase OS=Altererythrobacter sp. HN-Y73 OX=2320269; GN = D6851_16320 PE=4 SV=1
MVIYLYPEGVYVFALYQKERCVETTGIKRKLAIPAVWETEHAVAAHFAAGKDGEETVDASESRIADPAPHSLLVGALPFDRQAAPLLIEPETASWRHGVEALALSAQAPARLPARPVRLTGEPDGPAYARIVAEALRRLDRREGAVLRKVVLARSLHIVMDRPVDPLAIAARLMRDNSVTTFLMDLEEATGLPGHKMVGATPELLVARKGSQVLSHPLAGSAPRSSDPAADRAAADGLLHSEKDQREHSLVVEAIADMLAPYCSALTMPEGTTLRSTASMWHLGTRIEGRLKNGAMPSAAGLAALLHPTPAVGGMPRQAALDCIRELEPQDRGFYAGAVGWTDRAGDGEWYVSLRCAELRDKQLTLHAGAGIVAGSDPQSEVAETWAKFRAILQGLGIEADDSLMEFAA

SEQ ID NO: 93265 - protein, 443 aa, unidentified
  source 1..443: note = Alteromonadaceae bacterium
  REGION 1..443: note = tr|A0A420E705|A0A420E705_9ALTE Isochorismate synthase MenF OS=Alteromonadaceae bacterium ALS 81; OX = 2164068 GN=menF PE=3 SV=1
MISIDSTAFEKALEGLAATNLAGYQQLKFSCLKVDPLAWLNQQLHTVRGYWSEPSGAHTAFVGQACDLLSPEQLQNACESLNHNDDSLRFYGGMAFSRRSAQWPGFPQRRFVLPRFELRQNAQLSEFVINADFHNNPRQEIELIRSQFYALQDPHPLPPLSCQLRQYSYQPNFERWQKLVDEVTAPSFQAHTAKVVLARQTQIKLDRELNPFTLIDHWQKREQQCYSFVFQFDGVHSFVGCSPERLYSRDGLDLRTEALAGTAPRHIDPAQDIELANRLLEDDKNQRENQIVVDDLVRRLQEISLHVQPQAHTELLRLRRVQHLKRPIHATISPDLDDSALLSTLHPTPAVGGLPRSSAMRFIEQKEGFDRGWYSGAVGWFSGERSEFSVAIRSALLSPTSLNTYAGAGIVEGSQAQEEWDELNHKTAALLDLLQLDLDSLSA

SEQ ID NO: 93266 - protein, 405 aa, Amnibacterium sp.
  REGION 1..405: note = tr|A0A3A1U6H2|A0A3A1U6H2_9MICO Isochorismate synthase OS=Amnibacterium sp. DD4a OX=2306585; GN = D1781_00020 PE=4 SV=1
MLQPGDAPFPVTIRRIASAAEELAAAGAQHGPPVAVWRRDDDVLTGFGTAARLVFAGPGRVLDAAAAWRRFVARAVVDSDAPDASPVAFGAFAFADRSAAQSVLLVPRVVVVQRGGAAHRIDLDEVGPVVPPTTVPPVAPFPPEAYERAVDEAVRRIRQGAFEKVVLARHVVLDTPDLDLDAALRLLEDRYRGAWVFAVDGVFGASPETLATVRGGAATSRVLAGTAPRDQDPTADDANRAALLESPKNRFEHALAVDSLLLTLGPATDDLDIGRPFALGLRNVWHLATDATARVRAGVGALDLVALLHPTAAVAGAPREAALAAIEALEPFDRRRYAGPVGWIDGRGDGEWAIALRSAEVEGPDRVRAFAGAGVVAGSDPHQELEETGWKLQPIREAVAPVRAG

SEQ ID NO: 93267 - protein, 371 aa, unidentified
  source 1..371: note = Amycolatopsis acidiphila
  REGION 1..371: note = tr|A0A558AJV8|A0A558AJV8_9PSEU Isochorismate synthase OS=Amycolatopsis acidiphila OX=715473; GN = FNH06_06095 PE=4 SV=1
MDTGELLEDYTPGDFYFGTSRRTILGSGSLRTFTDTDVAALSEVVPAALAGSPTSLAVGVLPFDTAGTPGHIVLPETVRVAGPARPASRKTIGAASAVRAVPEPVRHVEAVGRAIKILRDGGLRKVVLARALDLEFDFEVSAQAILHNLAKDKAGAYTYAAGLPSGRTLLGATPELLLSRVGGQVISHPHAGSAPRSGDPVTDRENADALAGSRKDHIEHAVLTEAIVETLRPFCRSLDVPREPSLVSTPTMWHLGTVVTGELVDRDVTALHLAAALHPTPAICGSPTEAARQLVSELEPFDRGYYAGAVGWMDTEGDGEWAVSIRCAEVAERSLRLYAGGGIVPASDPKAELDETSAKFQTLLRAMGMEL

SEQ ID NO: 93268 - protein, 398 aa, Amycolatopsis alba
  REGION 1..398: note = tr|A0A229S587|A0A229S587_9PSEU Isochorismate synthase OS=Amycolatopsis alba DSM 44262 OX=1125972; GN = CFP75_05455 PE=4 SV=1
MSSPAPARPRPVHQAADLLAAYLPGSFYYSSARGSLLADGVYSPVHAAPGRRARAAAEVLDAALVAGVTEPVVAGAIGFRPDAPSSLVVPAVVRRAGPPGAGGPVAPLGGGNWAVSPRPAPEVYTTAVAKALDEIRDGDLRKIVLARCLDVTGGDPIAVPRLLARLVHADPAAHAFAVDVSAPGDPAPRTLIGASPELLVSRRGRVVTANPLAGSRPRVADDAENVRWIDDLLASEKDRDEHAHVAAQVAEVLGRFCVDLDVPAEPEVIGTPTMWHLSTRISGRLADAGDAGSSALGLAEALHPTPAVCGVPTGLARDTIAALEPEDRGYYAGLVGWTDQDGDGEWVVTIRCAEVLDRTVRLFAGAGVVAGSDPAAELTETGAKFGTMLRALGLEGAA

SEQ ID NO: 93269 - protein, 369 aa, unidentified
  source 1..369: note = Amycolatopsis bartoniae
  REGION 1..369: note = tr|A0A557YLX3|A0A557YLX3_9PSEU Isochorismate synthase OS=Amycolatopsis bartoniae OX=941986; GN = FNH07_31060 PE=4 SV=1
MDANQLLADYTPGDFYFGTSRRTILGTGARRTFTETDVASLSEAVPAALAPGSLAVGVLPFDTAGTPGHLVLPENVQVAGPAAPARHKDIGAPVAVRAVPEPVRHAEAVASAIKILKDGGLRKVVLARALDLDFEDEVPVQAILHNLAKDKAGAYTFAAGLPGGRTLVGATPELLLSRVGNQVVSHPHAGSAPRSADPVTDRENAEALASSRKDHLEHAVLTEAIVETLRPFCRSLDVPREPSLVSTPTMWHLGTVVTGELADRDITALHLAAALHPTPAICGTPTEAARRLVSELEPFDRGYYAGAVGWMDSAGDGEWAVSIRCAEVAESSLRLYAGGGIVPASDPKAELDETSAKFQTLLRAMGLEL

SEQ ID NO: 93270 - protein, 397 aa, Amycolatopsis japonica
  REGION 1..397: note = tr|A0A075USK4|A0A075USK4_9PSEU Isochorismate synthase DhbC OS=Amycolatopsis japonica OX=208439 GN=dhbC; PE = 4 SV=1
MSSPAPARPRPVHQAADLLAAYLPGSFYYSSARGSLLADGVYAPVHAAPGRRARAAAEVLDAALVAGVTEPVVAGAIGFRPDAPSSLVVPALVRKAGPPKASGPVAPLGGSWTVSPRPAPEVYTTAVAKALDEIRDGDLRKIVLARCLDVTGGDPVAVPRLLARLVHADPAAHAFAVDVSAPGDPAPRTLIGASPELLVSRRGRVVTANPLAGSRPRVADDVENARRVDDLLASEKDRAEHAHVAAQVAEVLGRFCVDLDVPAEPEVIGTPTMWHLSTKISGRLADVTDAGSSALGLAEALHPTPAVCGVPTGLARDTIAALEPEDRGYYAGLVGWTDQDGDGEWVVTIRCAEVRDRTVRLFAGAGVVAGSDPAAELAETGAKFGTMLRALGLEGVE

SEQ ID NO: 93271 - protein, 398 aa, Amycolatopsis lurida
  REGION 1..398: note = tr|A0A2P2FZM6|A0A2P2FZM6_9PSEU Isochorismate synthase OS=Amycolatopsis lurida NRRL 2430 OX=1460371; GN = BB31_04270 PE=4 SV=1
MSSPAPARPRPVHQAADLLAAYLPGSFYYSSARGSLLADGVYSPVHAVPGKRARAAAEVLDAALVAGVTEPVVAGAIGFRPDAPSSLVVPAVVRRAGPPKASGPVAPLGGATWSVSPRPAPEVYTTAVAKALDEIRDGDLRKIVLARCLDVTGGDPIAVPRLLARLVHADPAAHAFAVDVSAPGDPAPRTLVGASPELLVSRRGRVVTANPLAGSRPRVADEAENARRIDDLLASEKDRAEHAHVAAQVAEVLGRFCDDLDVPAEPEVIGTPTMWHLSTRISGRLADPGDAGSSALGLAEALHPTPAVCGVPTALARDTIAALEPEDRGYYAGLVGWTDQDGDGEWVVTIRCAEVRDRTVRLFAGAGVVAGSDPAAELAETGAKFGTMLRALGLEGVA

SEQ ID NO: 93272 - protein, 388 aa, unidentified
  source 1..388: note = Amycolatopsis panacis
  REGION 1..388: note = tr|A0A419I6M2|A0A419I6M2_9PSEU Isochorismate synthase OS=Amycolatopsis panacis OX=2340917; GN = D5S19_10575 PE=4 SV=1
MPTRTAPASPVETTLRYRRGDFLFATARRALLAQGAAAILADLDPRRLARTVAAELDRSGVPLAVGALPFDTGPDTTVPGRLVLPRTVHRAQAEAETPVLPPVEELPAPVATRRLPSAEGHRANVRAAVAALGERGLRKAVLARALDLEFDAPIPVERIVRNLACGNPRHHTYAAELPGGATLVGATPELLLSRAGDSVFTTPHAGSMPRAADPAADRASGERLRSSAKDQEEHAVVVEYVVEALRPFCRKLDVPGEPELVSTPAIWHLRTAITGELVDRSVTALDLAAALHPTPATCGTPTAGARALEKELEPFDRGYYAGTVGWVDAAGDGEWAVAVRCAQVTQQSLRLYAGGGIVAASDPEVEYQETVAKFGTLLAAMGLDDRSA

SEQ ID NO: 93273 - protein, 373 aa, unidentified
  source 1..373: note = Amycolatopsis rhizosphaerae
  REGION 1..373: note = tr|A0A558CY20|A0A558CY20_9PSEU Isochorismate synthase OS=Amycolatopsis rhizosphaerae OX=2053003; GN = FNH05_11575 PE=4 SV=1
MDARELLEQYTPGDFFFGTADRTILGTGSVHSFTDTDAFALSDAVPAALAESGSSLAVGVLPFDTAATAGHVVVPRVTRIAGPVQVADRKPVGAPVAVRAVPEPVRHVEAVARAVAALQARGMRKVVLARALDLEFTEDVPAEAILNNLVKDKAGGYTFAASLPHGRQLIGATPELLLSRTGDQVICHPHAGSAARSADPVTDRENGESLARSRKDHIEHGVLIDALVETLRPFCSSLDVPREPALVSTPTMWHLATRVTGRLADRDVTALHLAAALHPTPAICGSPTEAARTLVGELEPFDRGYYAGAVGWMDAAGDGEWAVSIRCAEVSERSLRLYAGGGIVPASDPKAELDETSAKFQTLLRAMGLDLDL

SEQ ID NO: 93274 - protein, 397 aa, Amycolatopsis sp.
  REGION 1..397: note = tr|A0A429CRC7|A0A429CRC7_9PSEU Isochorismate synthase OS=Amycolatopsis sp. WAC 01416 OX=2203196; GN = DL990_29785 PE=4 SV=1
MSSPAPARPRPVHQAADLLAAYLPGSFYYSSARGSLLADGVYSPVHAAPGKRARAAAEILDAALVAGVDEPVVVGAIGFRPDAPSSLVVPAVVRRAGPPKKSGPVAPLGGNWSVSPRPAPEVYTTAVARALDEIRDGDLRKIVLARCLDVTGGDPVAVPRLLARLVHADPAAHAFAVDVSAPGDPAPRTLIGASPELLVSRRGRIVTANPLAGSRPRVADDAENARRIDDLLASEKDRAEHAHVAAQVAEVLGRFCVDLDVPTEPEVIGTPTMWHLSTRISGRLADPGDAGSSALGLAEALHPTPAVCGVPTALARDTIAALEPEDRGYYAGLVGWTDQDGDGEWVVTIRCAEVRDRTVRLFAGAGVVAGSDPEAELAETGAKFGTMLRALGLEGVA

SEQ ID NO: 93275 - protein, 398 aa, Amycolatopsis thailandensis
  REGION 1..398: note = tr|A0A229RSY0|A0A229RSY0_9PSEU Isochorismate synthase OS=Amycolatopsis thailandensis OX=589330; GN = CFP71_29815 PE=4 SV=1
MSSPAPARPRPVHQAADLLAAYLPGSFYYSSARGSLLADGVYSPVHAAPGERARAAAEVLDAALVAGVPEPVVAGAIGFRPDAPSSLVVPAVVRRAGPPRAGGPVAPLGGGTWSVSPRPAPEVYTTAVAKALDEIRDGDLRKIVLARCLDVTGGDPVAVPRLLARLVHADPAAHAFAVDVSAPGDPAPRTLIGASPELLVSRRGRIVLANPLAGSRPRVADDAENARRISDLLASEKDRHEHAHVAAQVAEVLGRFCLDLDVPAEPEVIGTPTMWHLSTRISGRLADAGDAGSSALGLAEALHPTPAVCGVPTGLARDTIAALEPEDRGYYAGLVGWTDQDGDGEWVVTIRCAEVRDRTVRLFAGAGVVAGSDPAAELAETGAKFGTMLRALGLEGVA

SEQ ID NO: 93276 - protein, 469 aa, Anabaena cylindrica
  REGION 1..469: note = tr|K9ZN84|K9ZN84_ANACC Isochorismate synthase; OS = Anabaena cylindrica (strain ATCC 27899 / PCC 7122); OX = 272123 GN=Anacy_4416 PE=4 SV=1
MTISPCRSRFFVDYKDLHQLLLAVQEKCCENHTQQIVSISLEIDLIDPLIVLDKFAQANTLNFYFENKSKGEAITAIDSITKLKISGADRFNQAEDFIKNCRKNIISFGNIFQGFAGSHFFCSFSFFDQHNQVNYPFPSATIFLPKLQVAVKNESCVLVMNSVINADINIQTILQELKTKIQSLQSLTKPNIEIIPAKFIKENIINSDNFKYSVLSALEKIKSNHLIKIVLADALDVKSYRPFNLFKSLNNLRQLHPNCYVFSTSNGKGQNFIGASPERLISIQNQQLITDALAGSAPRGKTPREDAENANRLINSTKEKHEHKLVLDFITQRLSQLGLFPQILSPRLRQLSNIQHLWTPISAVVPANVHPLKIVGQLHPTPAVAGAARDVACAEIRNYESFERGLYAAPLGWVDSSGNCEFIVGIRSALIDGDRARLYAGAGIVAGSDPDKEFAEVQLKLQALLKALV

SEQ ID NO: 93277 - protein, 471 aa, Anabaena sp.
  REGION 1..471: note = tr|K7W755|K7W755_9NOST Isochorismate synthase; OS = Anabaena sp. 90 OX=46234 GN=menF PE=4 SV=1
MTISPCRSHTFVDYKYLNQLLLEIQENCRRHNYSKIVSIPLEIGLVDPLLVFDQFNQKNTINFYFENKSNGEAIAAIDTLDKIEISGKDRFTKSEEFIKNCLKNIIPISHENQTFSLPRFFCTFSFFDQHKKVDCPFPSATVFLPCWQIALKNNRCTLVMNTIINSRIKISRILDNLQRHLEIIRSLHTHSLNIDKFPLNLYKKITNNGEKFKTSVSSVLEIIHANQLRKIVLADILDVSANHDFNLLQSLNNLRQIHPNCNVFSTSNGQGQNFIGASPERLISIHKRQLITDALAGSAPRGKTPTEDATNANNLVNSTKEKHEHKLVLDFITQHLSQLGLFPQVLAPRLRQLSNIQHLWTPISAVVPNNIHPLQIVAKLHPTPAVAGAARDIACAEIRRYESFERGLYAAPLGWVDGEGNCEFIVGIRSALIDGNYARLYAGAGIVAGSDPQKEFAEVQLKLQALLKALV

SEQ ID NO: 93278 - protein, 456 aa, unidentified
  source 1..456: note = Anaerobacillus macyae
  REGION 1..456: note = tr|A0A0J6CXA7|A0A0J6CXA7_9BACI Isochorismate synthase MenF OS=Anaerobacillus macyae OX=157733 GN=menF; PE = 3 SV=1
MLHQGIRKAEKRGTSVLVSQVLSVAAVDPFSFYAAGPNKYDNDRTFWSDPENDTTIVGLGCVKQFQAYKDRFRTIENEWQSFLQFSIVDGAPSRPGVGPVLLGGFAFDPTAPESGDWDHFPEGGMVLPELMLTSAGSQGWLTINAIVNEDDDLEAVAEDLLLKHHGILAHSSTDISSKVDAISIEEIRPQEWKETVRSAAANIRTGKLEKVVLAREIRVQSSRSFSSSRTLMNLKKQQSDSYLFAFEYGKQCFLGASPERLVKREGQQVYSTCLAGSIQRGETPETDIELGYILLNDHKNRIEHDLVVQMIRRAMEEECDFVQVPSEPELLKTPHIQHLFTPVVARAGVGTSLLRMVERLHPTPALGGYPQEEAVEEIKRIENLDRGWYAGPVGWIDYQGNGEFAVAIRSGLLNGDQATLYAGCGIVADSDPESEYEETKMKFKPMLTALGGNQYD

SEQ ID NO: 93279 - protein, 840 aa, Anaerobiospirillum thomasii
  REGION 1..840: note = tr|A0A2X0V6R5|A0A2X0V6R5_9GAMM Isochorismate synthase entC OS=Anaerobiospirillum thomasii OX=179995; GN = entC PE=4 SV=1
MSEVPMQSMQDHMGIEFLELSSNKAMARMKVSTATIQPFGFVNGGALLAMAEILSGAASTYILPDDKVALGSSVHANHINTAPLDSIILAVATLVHQGSIHHIWDVKIYNSDKRIISTLQITNTIVSKAALQKKFAKTNAAAARYIENFDKNKLLTSSQPTAAEAQSFDDTTVADDMPFTLSDNSNPFDMSNSPVREAQTAETVTHAQSTDTAKDESDYSLKDENELAPDAEDLKDANVAIPETLVKYQSSIDRYKADVIFNSLLNHSTHKSYYDNIAMSTIKMLVHNSRVPESTLELMPSSAKFSPFNIQHPIKEFNLVDQDPEFKKRFKRVMNRYLKKRGDLERKAQDSKRDYSASKVPFDFKKELDALNLLYSQLFLDLIRLHIHEKSPAIDRLCKILNLVRNNELSQRINKSNEVRVFNIGFAVDVLNLLYKNFAIFPLKESGELCLIVSNPSHVRHDCTLENLAGQSGFIFFPFCANHNNENVFFKVDNNVIIGKDNIINFAINLLFNVYSRMLLHASLNSLPDLKKTCNLVLYMIYIQRHNSEAIKRNYDIYSFYRYIKMSMPEFFTDGADFIKEELSKDIYRHAFDRASTFIRQNECRKLVLSRRNDFEFEKSVGSVFDACLGKYKDTAFTYLIKNDVKGIWIGASPEILASFNNNVLSTVSLAGTMPVIEDLSLAKWSEKNQKEQQLVTDYIEDVVKKYTSSYHKSDVYTAKAGPVMHLKTDFKAHVGNLHTALSLARELNPTPAVCGLPKDEVKAFLVENEGYDREYYSGMVGYINNSEFSFYVNLRCMRIIKQTASLYVGGGVLPESNFEDEFDETCHKLETMKTLLKNK

SEQ ID NO: 93280 - protein, 475 aa, Anaerococcus tetradius
  REGION 1..475: note = tr|C2CI81|C2CI81_9FIRM Salicylate synthase; OS = Anaerococcus tetradius ATCC 35098 OX=525255; GN = HMPREF0077_1191 PE=4 SV=1
MIFINIYVKIKLVKTNLIKEDNMPKINRGTYDKATIDISDNDNLNSFVLAIKIIEDVANEIQPYMVYENFNEISVAIGEYIGIEVYTEKILITENGDTVEHKVSDLSEDMKKVFENINFTDWRMYGIADFNYAKHTFLKNVSDKEVLLKMFIPRTDIRILEGSIEVKSVDNIDEIISAVEKCTINSTKEELKKNTSQVDLEKLKSIDSEYYKEIVSKGIEEINNDKYDKVILSRKIKLEKKILLKDSFLLGRKYNTPARSYCLKIGDVEVIGFSPETVVEVDEEKKVYTFPLAGTRALTDDPIKNKELKCELLKDPKEIAEHAVSVKLAFEELEKVCIKDSISVVKFMEVLERGSVQHLASRLKGTLKEEFNEWHAFTALFPAVTASGIPKAECIDAIDRLEKDERGLYSGGVLTYDQNGTMDVALALRTAFQTDKETWIRVGAGIVKLSKAERELEETKEKAGSILDKLVYIED

SEQ ID NO: 93281 - protein, 442 aa, unidentified
  source 1..442: note = Anaerolineaceae bacterium
  REGION 1..442: note = tr|A0A3A4QL95|A0A3A4QL95_9CHLR Isochorismate synthase OS=Anaerolineaceae bacterium OX=2024896; GN = C4586_02660 PE=4 SV=1
MNRIVNYTVPFHPHSLTEFLRFGSGMERFYFESNQSPLAIAGLGIAAQISHNGANRFANLGQSLDDFFQHIICVNESDALPRPVLLGGGSFFDQTEHGNWASFPQAALTLPHYALIRVNGEFFFSVNQLSAENESLADASRRAQREAESLLARLASAILPTPSIPDEITSSETSRRTWEEIFQQSIALIRDHKLKKVVMARPLQAHGNRPMDIPALLVRLGESCPSCFRFLFEFRPGVTFAGSTPERLVAVSGAKFTTTAIAGSIRRGDHPAEDEALGQQLLDSAKDQSEHTFVLDQIREKMLPLTESLSIDSVPKLLRLPNIQHLRTDITGTLHPDRNILNIVAALHPTPAVGGVPVEAALRVIRELEGFERGWYAAPVGWVDANGDGDFVVAIRSGLFQGNTATLFGGAGIVADSDPQKEWDETGLKIHFLLNALQGELA

SEQ ID NO: 93282 - protein, 436 aa, unidentified
  source 1..436: note = Anaerolineae bacterium
  REGION 1..436: note = tr|A0A3M1MU64|A0A3M1MU64_9CHLR Isochorismate synthase OS=Anaerolineae bacterium OX=2052143; GN = D6755_06875 PE=4 SV=1
MKTAARTLVWHAVPSNERSLLAFLRRAGGQPRFFWQQDEISLAGIGIALQIHAAGENRFSHVQAQAEEWFRGMHAAPQSDTPPWVHPYLLGGFAFSPEHEPAGIWEGYPAAWFILPRYTLLRKGNRTWLLAAAISDSPNPEAARELLWELPAPQARPHTPPALPAVSEYPRRAEWEAAVTQATQHIRAGRFRKVVLSRRRRLRVQSPVDPLLALDRLRLRYPNCYRFLFEPRPGHAFFGATPELLVSARDGQVRTMALACSMRRGVTLEEDAELGARLLHSAKDRHEHALVVEAIRNALAPLCQQMDIPAAPRLHRLSNIQHLLTPIHGRLRRGFTPLDVAAALHPTPAVGGLPRAAALAYIRQAEGQARGWYASPIGWLAPDGAATFAVALRCALTTGNEVHLFAGAGIVADSDPAAEWRETALKFRPVQEALVG

SEQ ID NO: 93283 - protein, 415 aa, Ancylobacter aquaticus
  REGION 1..415: note = tr|A0A3S0GIL5|A0A3S0GIL5_ANCAQ Isochorismate synthase OS=Ancylobacter aquaticus OX=100 GN=EJV44_20580; PE = 4 SV=1
MRRCAGAARTDATEVAPAVGFGAAAAPSVSPASDMPFVLVGAGETLVAGGALSSVGEGPEPLGARVRRLLAEGEGPDLVVGALPFGASAPAHLYRPAALSRHPGRGGFAAAMPLPRRAESLRPARWQVTPEPPLAAYQTAVAAALARMSQGGEGLRKIVLSRSLKIIADRLIDATALLRALAQDESVTAFCVPLPSTGAPRALVGATPELLVSRRGARVTSHPLAGSSRRAREAGADHAAAQALLGSEKDRREHREVVAAILDQLAPHCTDLAAPGEPELTSTASMWHLGTPITGRLRDASLSALDLALLLHPTPAVCGTPRNAAAAAIAELEGYERGFYAGAVGWCEASGDGDWHVAIRCAELSGREARLYAGAGIVAGSDPVAEGEETSAKFAALLTALGIDEKGNPVAEERA

SEQ ID NO: 93284 - protein, 376 aa, unidentified
  source 1..376: note = Ancylomarina sp.
  REGION 1..376: note = tr|A0A4V1N036|A0A4V1N036_9BACT Isochorismate synthase OS=Ancylomarina sp. SHSM-M15 OX=2501299; GN = EO244_09005 PE=4 SV=1
MKEDFVLKKTEAVLTTCLANHLAFYAYKHPNSQHIEIGIQKDMDLLKYTDFADLDGLSGFVMAPFVSTEQHSSWFIRDDFNFSSFGDDEIELLSQYKNTIEEKEDKTVTGSKQDEYFTQIAAFLDELKAGSLEKAILSRIQLEKGISEVKRAALFLQLCQCYPHAFVSFVSLPGICSWMGASPELLFKSQNNNSETVALAGTLPINKDHIQETEWGNKEIEEQAFVSDYIERVFRDNAICDYEKIGPYTVQAGQIVHLKTDFRTDANLSFKNKARIISALHPTPAVCGLPKTKALDLIKRVESHDREYYAGFWGPVHANGDCALYVNLRTMKLSENHLSLFVGGGITADSIPQKEWEETQHKAQTLLSVINQFVSS

SEQ ID NO: 93285 - protein, 458 aa, Anoxybacillus amylolyticus
  REGION 1..458: note = tr|A0A4R1GG81|A0A4R1GG81_9BACI Isochorismate synthase MenF OS=Anoxybacillus amylolyticus OX=294699; GN = menF PE=3 SV=1
MAIGFRHHLQQQLHRLAVNAGRPFVSWAEPWEGVDPVSFFMQGPSCGFRERFFWADRTGGTILVGLGSVYAIETEKADSRFDDVEAGRRRWKKEMEPYGAADAPPLLFGGFSFDPYRPGTDMWRGFPAGKLVAPAALLAVRNGKTTLTVTVPTDKRGRDWERVGRLLERISDPMAAPKRLPRLVSDEEEEKERWLAAVREAIASIRAGALDKVVLARARRLAFAKTVDAAAVLQRLREQQPFAYIFAFEQDGRCFIGASPEQLVQKEGKMCRSVCLAGSVRRGADMEEDERLGAWLRADRKNNEEHQFVVQMIGRLFSSVCETVEMPPAPQLLKLPHIQHLCTPVVGRGSRERSVLRLVEMMHPTPALGGTPRDRALEVIRALEPLDRGWYAAPIGWVDGEGNGEWAVAIRSALLAGKEAMLFAGCGIVADSDPNSEYEETNVKMAPMLSALGVMNDG

SEQ ID NO: 93286 - protein, 451 aa, Anoxybacillus ayderensis
  REGION 1..451: note = tr|A0A1X6MBM7|A0A1X6MBM7_9BACI Isochorismate synthase MenF OS=Anoxybacillus ayderensis OX=265546; GN = menF PE=3 SV=1
MVTLYQNKVIDQLRDALKKKKHMVSVTVRVGQIDPLSFFAAGETLFHGQRFYWSDCFHEHTLVGLGHAQVIKSEEKTKKRFREVEKAWQQIVEGAFIEGEEPLMFGGFAFDPMKRSAEHWSHFPSAQFVLPKFLLTKRGEETWLTVNVVHESFTELEKMIDSLFIIHDEIDSYDVEVVEKEEVARDRWFHAVRHATDLIQDGEIEKVVLARELFLSFSHRIDRSHVLRSLREQQPMSYIFAFENGSTCFIGASPEQLVKKNGYMCETACLAGSIRRGHTMKEDEELGQWLLKDDKNRREHAFVVDMIEQAMHEICTEVIVPSEPTLLKMRHIQHLYTPVQAKIKEGVSIFSLVERLHPTPALGGFPKQKAVQTIRDIEPLDRGWYAAPIGWVDANGNGEFAVAIRSALLEDNEAHLFAGCGIVAHSDPLSEYEETNVKFKPMLLALEGGRR

SEQ ID NO: 93287 - protein, 451 aa, Anoxybacillus flavithermus
  REGION 1..451: note = tr|B7GK08|B7GK08_ANOFW Isochorismate synthase MenF; OS = Anoxybacillus flavithermus (strain DSM 21510 / WK1); OX = 491915 GN=menF PE=3 SV=1
MVTLYQNKVIDQLRYVLGKKEHMVSITIRMEQIDPLAFFSAGETLFYGQRFYWSDCLHERTFVGLGRAQVIKSEEKTKKRFRDVEREWKQIVEGAFIEGQGPLMFGGFAFDPLKQSDEHWIEFPSAQFVVPTFLLTKQRDEIWLTVNVVHESLNQIEEMIDSLFHTRDESDWHRAHIVKKEEVARDQWLRAVHYATDLIRNDAIEKVVLARELFLSFSDRINCSQVLHELHEQQPMSYIFAFENGSTCFIGASPEQLVRKNGHMCETACLAGSIRRGHTMEEDEELGRWLLQDDKNRREHAFVVDMIKQAMNEVCTEVVIPNEPTLLKMRHIQHLYTPVQGKVKEEVSIFSLVERLHPTPALGGFPKEKAVQTIREIEPLDRGWYAAPIGWVDANGNGEFAVAIRSALLEENKAHLFAGCGIVAHSDPHNEYEETNIKFKPMLSALEGGWR

SEQ ID NO: 93288 - protein, 451 aa, Anoxybacillus gonensis
  REGION 1..451: note = tr|M5QUC2|M5QUC2_9BACI Isochorismate synthase MenF; OS = Anoxybacillus gonensis OX=198467 GN=menF PE=3 SV=1
MVTLYQNKVIDQLRDALKKKEHMVSVTVRVGQIDPLSFFVAGETLFHGQRFYWSDCFHEQTFVGLGYAQVIKSEEKTKKRFREVEKAWQQIVEGAFIEGEGPLMFGGFAFDPLKRSAEHWDHFPSAQFVIPKFLLTKRGEETWLTVNVVHESFAELEKMIDSLFVIHDESDNYDVDVVEKEEVARDRWLYAVRHATDLIQDGEIEKVVLARELFLSFSQRIDCSHVLRSLREQQPMSYIFAFENGSSCFIGASPEQLVKKNGHMCETACLAGSIRRGHTMKEDEELGQWLLKDEKNRREHAFVVDMIEQAMHEVCKEVIVPSEPTLLKMRHIQHLYTPVRAKIKEGVSIFSLVERLHPTPALGGFPKEKAVQTIRDIEPLDRGWYAAPIGWVDANGNGEFAVAIRSALIEDNEAHLFAGCGIVAHSNPLSEYEETNVKFKPMLLALEGGRK

SEQ ID NO: 93289 - protein, 412 aa, Anoxybacillus kamchatkensis
  REGION 1..412: note = tr|A0A4S3L540|A0A4S3L540_9BACI Isochorismate synthase OS=Anoxybacillus kamchatkensis OX=196180; GN = CI793_04975 PE=4 SV=1
MQTKEMIHATAEQLLAEYKAGISFFLASPRQTLLAQGMVAVVPTNGYENEKAQIIDHIKQVLKRVKQQGISHYPMVVGAIPFDHLYPAQLMVPSEVEWAGPLSFGQWKEPIEQQADREYKVTPIPSPEGYKDAVEQGLQRIKAGDLRKIVLSRSLQLTSTQKVDIPRLLRQLAVHNPTGYTFAAALPDRVVRADAAPHEITGNRTLVGASPELLVAKSGMQVIANPLAGSAPRSSDPEEDRRRAQELLSSAKNRHEHAVVIEAVANALRPFCKTLDVPEEPSLIHTETMWHLSTVIRGELSSSSITSLDLAFALHPTPAVCGTPTPVAKRAIQEIEPFERGFFTGMVGWCNEEGDGEWIVTIRCAEIEDHTLRLFAGAGVVEGSKPEEELAETSAKFRTMLLAMGLNDDILK

SEQ ID NO: 93290 - protein, 449 aa, Anoxybacillus pushchinoensis
  REGION 1..449: note = tr|A0A1I0SKW4|A0A1I0SKW4_9BACI Isochorismate synthase MenF OS=Anoxybacillus pushchinoensis OX=150248; GN = menF PE=3 SV=1
MVTLYQSKVIDQVRDALNKKRHMASVAVKIKQIDPLTFFEAGAKLFHGQRFYWSDCLREQTFVGLGHAYVIKSENKTSERFREVEYAWKQMVEGAFIQGEGPLMFGGFAFDPMKRSAEHWDNFPSAQFVVPTFLLTKKQDETWLTVNVVHESLEQIEHMIDSLFAQHEEGKWGGSYVVKKEEVARDHWLHAVHHAMRLIQHGVIEKVVLARELVLSFSERLNYAHVLRSLREQQPMSYIFAFENGSPCFIGASPEQLVKKNEDICETACLAGSIRRGHTIKEDEELGRWLLRDEKNRHEHAFVVDMIERAMNEVCAEVIVPSEPVLLKMRHIQHLYTPVRAKVHDDVSIFSLVERLHPTPALGGFPKEKAVQTIREIEPLDRGWYAAPIGWVDAKGNGEFAVAIRSALLHDHEAHLFAGCGIVAHSNPRSEYEETNVKFKPMLLALEGK

SEQ ID NO: 93291 - protein, 461 aa, Anoxybacillus sp.
  REGION 1..461: note = tr|A0A160FC71|A0A160FC71_9BACI Isochorismate synthase MenF OS=Anoxybacillus sp. B7M1 OX=1490057 GN=menF; PE = 3 SV=1
MATLYQHQIRKKLEMITKSACQPFVSWSGIVPSIAPVYLFKLGETSSFSERFYWSDRSNEVVYAGIGCTYVIAEEGDGPRFSIVEEKWHDFLNMTEVHGEEEKATPVLFGGFSFDPLKRKTDKWTHFSNAKFIVPTVLLSLKKDCAMITITVPSKNNQSMLEEIDRLLGLLYTKSFHPTPSLPRCVTYEEIRTDEWIHAVRQIIDGIQQGSFDKVVLAREVRLQFDGQLTPSAVLEHLCEQQPFSYLFAFEQAGSCFIGASPEQLVKKEEHTFYSTCLAGSIRRGRTSSEDESLGQVLLQDEKNLHEHLFVVEMIRQAMQDVCEDVKISPEPQLLKMRDIQHLYTPVIGKSDSRVSLLSVVERLHPTPALGGAPKEKALEMIREAEPLDRGWYAAPIGWMNAMGDGEFAVAIRSGLLQGNEAFLFAGCGVVGDSEPFSEYEETNVKLKPMLSALGVKQDER

SEQ ID NO: 93292 - protein, 451 aa, unidentified
  source 1..451: note = Anoxybacillus suryakundensis
  REGION 1..451: note = tr|A0A0K6GK29|A0A0K6GK29_9BACI Isochorismate synthase MenF OS=Anoxybacillus suryakundensis OX=1325335; GN = menF PE=3 SV=1
MVTLYQNKVIDQLRDVLKKKQHMVSVTIKMEQIDPLDFFAAGETLFHGQRFYWSDCLYERTFVGLGHAHVIKSEEKTKKRFREVEREWKQIVEGAFIEGQGPLMFGGFSFDPLKQSDEHWSEYPAAQFVVPTFLLTKQRDETWLTINVVHESLGQLEEMIDSLFHIRGESEWHRTDVVEKEEVARDRWIRAVHHATDLIQSGMIEKVVLARELFLSFSHRIDRSYVLRALREQQSMSYIFAFENGSTCFIGASPEQLVRKNGHMCETACLAGSIRRGHTIKEDEELGRWLLQDDKNRREHAFVVDMIEQAMNEVCTEVFVPSEPTLLKMRHIQHLYTPVQAKTREGISIFSLVERLHPTPALGGFPKEKAVQTIREIEPLDRGWYAAPIGWVDANGNGEFAVAIRSALLGDNEAHLFAGCGIVAHSDPHSEYEETNVKFKPMLLALEGGRE

SEQ ID NO: 93293 - protein, 451 aa, Anoxybacillus thermarum
  REGION 1..451: note = tr|A0A0D0RZQ0|A0A0D0RZQ0_9BACI Isochorismate synthase MenF OS=Anoxybacillus thermarum OX=404937 GN=menF; PE = 3 SV=1
MVTLYQNKVIDQLRDALKKKKHMVSVTVRVGQIDPLSFFAAGETLFHGQRFYWSDCFHEQTFVGLGYAQVIKSEEKTKKRFREVEKAWQQIVEGAFIEGEGPLMFGGFAFDPMKHSAKHWSHFPSAQFVIPKFLLTKRGEETWLTVNVVHESFVELEKMIDSLFIIHDEIDSYDVEVVEKEEVARDRWFHAVRHATDLIQDGEIEKVVLARELFLSFSHRIDRSHVLRSLREQQPMSYIFAFENGSSCFIGASPEQLVKKNGYMCETACLAGSIRRGHTMKEDEELGQWLLKDDKNRREHAFVVDMIEQAMHEICTEVIVPSEPTLLKMRHIQHLYTPVRANIKEGVSIFSLVERLHPTPALGGFPKEKAVQTIREIEPLDRGWYAAPIGWVDANGNGEFAVAIRSALIEDNEAHLFAGCGIVAHSNPLSEYEETNVKFKPMLLALEGGRK

SEQ ID NO: 93294 - protein, 459 aa, unidentified
  source 1..459: note = Anoxybacillus vitaminiphilus
  REGION 1..459: note = tr|A0A327YKY8|A0A327YKY8_9BACI Isochorismate synthase MenF OS=Anoxybacillus vitaminiphilus OX=581036; GN = menF PE=3 SV=1
MVTLYTNKIQEQLHMMMKMANANTSFISVNEKTDSVDPLRFFHLGEKFSFGQRFFWSDPVNEAVYVGLGCTYSIEARHHENRFAEVEREWKRFIEQVLFDQKGRGPLLFGGFSFDPLKAKTKRWVNFPEAKMIVPMMLLSNVKGESSITITIPTQNNEEELLRIEQMLALLQQETIVPYKHNATCVKMFEIEKDEWLTAVTKATSDIRNGELGKVVLAREARLLFDKRINPTVVLKRLREQQPFSYIFAFESGSDCFLGASPEQLVKKDDDMCYSTCLAGSIRRGKTLKEDEELGNWLLQDSKNLHEHRFVVDMIKEAMLKVCDEVIIPDQPSLLKMRDIQHLYTPVRGFSRQPISLLSLVERLHPTPALGGTPRSKALQKIREIEPLDRGWYASPIGWLDANGNGEFAVAIRSGLLQGNEASIFAGCGVVGDSDPLSEYEETRVKFKPMLSALGGSEK

SEQ ID NO: 93295 - protein, 459 aa, unidentified
  source 1..459: note = Aphanocapsa feldmannii
  REGION 1..459: note = tr|A0A524RVF6|A0A524RVF6_9CYAN Isochorismate synthase (Fragment) OS=Aphanocapsa feldmannii 277cI; OX = 2507554 GN=ERJ68_01145 PE=4 SV=1
FAELLDQARWAAAALADDAVLCLGLPLDPLDPLAALPMLPLQQSFRNVWDGAPGLTVVATGVEQSLEMRGPRRFPLAQRFVNATLQRVLRAHHCDWAPSRPRVCLAFSFFDQVDGEGPAGVTAVLPRWQLARQGRRCWLLLLRAIGGDVTARSMAEELWEQSQRLEAPSPHPLTLPAVVHRDQDWLDSFCSGVSQALELISCGELRKLVLAARQDLLLDAPLDPLTLLHGLRLQQPGSCRFLWQDPNHPAAGMLVGASPERLMELRVGRLRCDALAGTAPTGPSQRQLLLGSRKDRHEHELVVEEMVRSLQQLGLRPKHRPMPRIARHGGLLHLHTPITAPAGKVAPLALAAGLHPTPAVAGLPRREALGWLRSLEGFKRGLYAAPVGWVDACGDADLRVAIRSGLVRGHRLTLTAGAGIVAGSDPERESREVELKLSVLQRSLGRGLPTLERCTASAV

SEQ ID NO: 93296 - protein, 474 aa, unidentified
  source 1..474: note = Aphanothece sacrum
  REGION 1..474: note = tr|A0A401IBP1|A0A401IBP1_APHSA Isochorismate synthase MenF OS=Aphanothece sacrum FPU1 OX=1920663; GN = menF PE=3 SV=1
MMRTRNNVDFSQAKLSLADKLKAFFIHDIFLLPNTDKFIRLEVPLNSLNLLSWLQQQKNNIKTYWSDREQKFEMAGVGEADVIHGQQTIDLASCFNHFHKFLSPDCKNLRYYGGINFNGKPILASCWQGFGNYRFIVPRFELYRDNQNTSLVCNFKLQHSDSYNRQLEYLLNELDELVFDSFYKSKELPEFIKREDIPNERDWDQNINMALASFERGETAKIVLARQAIFEFLGQVEPLTVLEILKKSNTRLFRFCFQPSEGNAFIGGSPERLYFRLEKLLQTEAIAGTRSRGKSLREDQKFGEELLNSDKDLREHKFVVHSLQGALAQMCHSVGLNREPMLLKLNKIQHLYTPCNGILFDEVSDAEILSKLHPTPAVGGYPKVQALEVIEQIETFERGWYASPVGWVGHDSSEFVVGIRSGLINNNKLSLFSGAGIVQGSDPQEEWQEIENKIGTFLQIMKYFDKIKTPIQIG

SEQ ID NO: 93297 - protein, 324 aa, unidentified
  source 1..324: note = Apibacter sp.
  REGION 1..324: note = tr|A0A563D902|A0A563D902_9FLAO Isochorismate synthase OS=Apibacter sp. AL1 OX=2509005 GN=ETU09_08525; PE = 4 SV=1
MYKLPFAIIRLPKCSKYFLIENDKNGSNLYKFNSFNNSKQYILSYHNLIELHKPEFKNLNFSLSKSEEVKILNKNDYITLVNKTIDYIKNSNALKIVISRNLWLSRSNINPINSFLALCDANPNSFCHLSVWNNDEIWIGSTPEILGYYDNSIFKTMALAGTLPNKNSYHWSEKEIYEQKLVSDYIYQILNIYCDNISILGPETYGLNHIKHLVTHFSSQIKNDKSIYELINALHPTPAVCGLPLNLSKKFIDENEGYDRDFYAGFIGLEDISFKKYFVNLRCGKLFSNGALLFVGGGITAQSNPEKEWYETEMKSKIIVECLK

SEQ ID NO: 93298 - protein, 383 aa, unidentified
  source 1..383: note = Unknown
  REGION 1..383: note = tr|A0A2H9ZV94|A0A2H9ZV94_9ASPA Isochorismate synthase / 2-succinyl-5-enolpyruvyl-6-hydroxy-3-cyclohexene-1-carboxyl ate synthase / 2-succinyl-6-hydroxy-2,4-cyclohexad iene-1-carboxylate synthase / O-succinylbenzoate
MITIALKLLTSNKQQPPCRQYMIINPLAITAAFANINPNPNSQAAIFLLIRRESEGEKMVNWVEAQKPLLHGLVKMAGLRQLTVEIEPGTSMSFWVPKDKLPKTKNTTKEVFPVGKTGSVSGANKKEKPVVVLIHGFAAEGIVTWQFQVGALTSRYAVYVPDLLFFGGSVSTSADRSPEFQAHCLAMALGRLGVARCTVVGFSYGGMVAFSMAAARPELVEAIVVSGSIIAMTDSISTETMERLGFSSSKELLLPQTVKGLKALFKVATYKKLWLPERLFKDYLKVMFNNRKERAELLEALINSSKEANVPVFRQRILLLWGENDNLFNVGLAKDMKEQLGEIATLQPVKKAGHLVHLERPCVYNRQLKQFLALVNSSSENKI

SEQ ID NO: 93299 - protein, 462 aa, unidentified
  source 1..462: note = Aquibacillus sp.
  REGION 1..462: note = tr|A0A516KHR1|A0A516KHR1_9BACI Isochorismate synthase MenF OS=Aquibacillus sp. TKL69 OX=2594883 GN=menF; PE = 3 SV=1
MIETQIPMLEQALEQALSVWKVENKPQLISITEKMDAIDPFIFFDRGTKWKGKRIFWSSSQESFFLVGVGEAISIDSNNQDFLQTEEQWKSLLKEASIYNAFQVPGTGPVAFGGGSFDPDKKSTKLWKEFKETQFRIPSYLLTITNGETYVTFNAMVASDEDTVSIRQDMLLAKQYLLAEQKGLPAGPSIVQKEEIASDQWKELVEKATNEIKSGQAKKIVLAREMRVDFEEDASLSSILYQLHESQTNSFIFAFENERDCFLGASPERLVRLQDNELLSTCLAGTAPRGVTREEDEKIGAALLADEKNREEHDFVVQMIRNAVEACCEQVHVPSDPVLYPLRNLQHLYTPVQAVLKKGYSILDVVQRLHPTPALGGLPREESMMFIREFEQLDRGWYGAPIGWMDAYQNGEFAVAIRSALLQGKSASLFAGCGVVKDSEPEAEYQETMIKFTPMLSVLGGS

SEQ ID NO: 93300 - protein, 360 aa, unidentified
  source 1..360: note = Aquimarina algiphila
  REGION 1..360: note = tr|A0A554VBS8|A0A554VBS8_9FLAO Isochorismate synthase OS=Aquimarina algiphila OX=2047982 GN=FOF46_27590; PE = 4 SV=1
MNIDNVYTDLKKQLKAELPFVIYRKANTQEIDVFLQEDDELYEYKDNTISGFVFAPFNTLEKTVLIPMDKSICYTVTITSPTNIDKNENDVKYDSVLVSSAKEEHMQLVRRGIDAIKAKCFKKVVLSRKEEVVCENNDALEIYKRLVMNYPKAFVYCWYHPKIGMWLGATPETLLHVKENHFYTMALAGTQPYLGEMNVEWGDKEIEEQKMVTDFILDELTPVSKRIESSNVYTYRAGTLLHLRTDIKVVLKTASSDIAKVIQIVHPTPAVCGLPKKEAKSFILEYEGYNRKYYTGFLGELNVNKNGKIESSLFVNLRCMEMKPDKAILYVGGGITKDSEPEKEWEETVKKTETMKKVLF

SEQ ID NO: 93301 - protein, 360 aa, Aquimarina sp.
  REGION 1..360: note = tr|A0A3A9VG20|A0A3A9VG20_9FLAO Isochorismate synthase OS=Aquimarina sp. AD10 OX=1714849 GN=D1816_05610; PE = 4 SV=1
MNIKDVFTKINKQYQDKLPFVVYRKPGEDILKCLLQKNDVLHQMDSYDTSGFVFAPFDNKSKSILIPVKNSEHYQCALAKLVAPENIDSFRENRTVNDLSKQEHIKLVNKGIQEIKSGILKKVVLSRKEEVDFTNNNLLDVFSELLNKYPNAFVYCWYHPKVGLWLGATPETLVETKEGSFHTMALAGTQPYIDTVDVQWGDKEKEEQAMVTDFVLKQLSSVIKNISSSERYTHKAGTLLHLRTDIQGGISDEMIPQFHNVINVLHPTPAVCGLPKDNAKSFILQEEGYDRKYYTGFLGEVSFASNEEMQSNLYVNLRCMSISENKASIYVGGGITKDSIPELEWEETVRKTETMKNVLL

SEQ ID NO: 93302 - protein, 404 aa, unidentified
  source 1..404: note = Aquimixticola soesokkakensis
  REGION 1..404: note = tr|A0A1Y5T939|A0A1Y5T939_9RHOB Isochorismate synthase DhbC OS=Aquimixticola soesokkakensis OX=1519096; GN = dhbC PE=4 SV=1
MQVLNIDIEGAQTASSAGRSAPKTHPKTHPETHPAPEAGLSGCAFLLGQDFGEITKTYTATLAQFATCDLTQAIPDDGHETAPQAGRLFGVFPFDRTDQGHLYRLSPKATPAQVAADEAVSHSLTRLPETQGFGASVDAVAQKINAGDGGLKKVVLARSLVYDTDAPIDPVQVALRLSADRHVTSYCVPLPGESAAPRWLVGATPELLLSKQGAAIRSHPLAGSARRQSDASADAAVGQALLTSEKDNIEHRVVVEYIHDVLTPYCRSLKVPDQPQLDRTATMWHLGTAISGVLKEADTPVLALLRDLHPTPAVAGFPLAAALAQIDAQEPFARDFYAGTLGWLDGDNNGAWHVTLRCAVIAQHSAQLFAGAGIVGASKAADEIAETRAKFGAMRLALGICERL

SEQ ID NO: 93303 - protein, 459 aa, Aquisalibacillus elongatus
  REGION 1..459: note = tr|A0A3N5AYZ2|A0A3N5AYZ2_9BACI Isochorismate synthase MenF OS=Aquisalibacillus elongatus OX=485577; GN = menF PE=3 SV=1
MLQTKQLSLREQLMTIQEQLNKHEQVNVSIVESIDDINPVDFFASFDRQELVRTFWKDPKEGTFFIGVGQLETFESKGKQRFDSMKEQWNHFISNISIPNEAPKGTGPMLMGGFSFNEKISSDKWSSFEPGLMVLPEMMLSVFNENSYMTYNVTVSQNTDLDQLVNRLKNWEQGVSSAAENKTDLVSTNSLDYRNWNQLIEQAVASIKSGELGKVVLARELEATFEQVIPINSVLERMVNQQKDSFIYVFDQGEEVFVSATPERLVRVDGDELLSTCLAGTISRGETLEEDEALASSLLNDEKNRNEHQYVVNMIKEAVEPLTDSVDIPEKPVIYPLRALQHLYTPVTAKLKHSNSIFDLIKKLHPTPALGGEPRNEAMRFIKHYEPFERGWYAAPIGWVDHQGNGEFAVAIRSALVQKDQATLFAGCGIVEESDPQEEYEETKLKFTPMLEALGGISQ

SEQ ID NO: 93304 - protein, 569 aa, Arabidopsis thaliana
  REGION 1..569: note = sp|Q9S7H8|ICS1_ARATH Isochorismate synthase 1, chloroplastic OS=Arabidopsis thaliana OX=3702 GN=ICS1 PE=1; SV = 2
MASLQFSSQFLGSNTKTHSSIISISRSYSPTPFTRFSRKKYESCSMSMNGCDGDFKTPLGTVETRTMTAVLSPAAATERLISAVSELKSQPPSFSSGVVRLQVPIDQQIGAIDWLQAQNEIQPRCFFSRRSDVGRPDLLLDLANENGNGNGNGTVSSDRNLVSVAGIGSAVFFRDLDPFSHDDWRSIRRFLSSTSPLIRAYGGMRFDPNGKIAVEWEPFGAFYFSVPQVEFNEFGGSSMLAATIAWDDELSWTLENAIEALQETMLQVSSVVMKLRNRSLGVSVLSKNHVPTKGAYFPAVEKALEMINQKSSPLNKVVLARNSRIITDTDIDPIAWLAQLQREGHDAYQFCLQPPGAPAFIGNTPERLFQRTQLGVCSEALAATRPRAASSARDMEIERDLLTSPKDDLEFSIVRENIREKLNGICDRVVVKPQKTVRKLARVQHLYSQLAGRLTKEDDEYKILAALHPTPAVCGLPAEEARLLIKEIESFDRGMYAGPIGFFGGEESEFAVGIRSALVEKGLGALIYAGTGIVAGSDPSSEWNELDLKISQFTKSIEYEATTSLQAIN

SEQ ID NO: 93305 - protein, 456 aa, unidentified
  source 1..456: note = Unknown
  REGION 1..456: note = tr|A0A343TFR5|A0A343TFR5_9ARCH Menaquinone-specific isochorismate synthase OS=archaeon AArc-Sl OX=2055893; GN = menF PE=4 SV=1
MESPRTRNRSGLVSRARQLPETSLRTAFDALSPPRIVWGPPEGALVVAGGAAATIEAREGNRFREVASATEALFDSGDVHAGTEAARPRVFGGFSFNNGDGKYRESDGGSPWDGYPDARFLLPRVQVTITDRGAWLTVTDAGENARVEDVERRLDAEFDRLTGATSTGTRSSPPGIAERRRTTTREEWSSSIRSALDRIERNELTKVVFAQALEIDLEGQLDPASTLDRLGEAYPDCYRFCFETPDGEAAFFGATPERLVSLRGRTVETGALAGTIGRGETPAEDEWLAEQLRTDPKNAHEHELVVEAIREQLSPFSASVATGDRRIKRLATVQHLWTPITAELTDDRGVLELVEALHPTPAVGGVPPERALETIGETEPFDRGWYAAPVGWVDAAGNGEFAVALRSALSTGSRATLFAGVGVVGDSDPDEEWDEAQLKFQPVLNVLDDGDEREET

SEQ ID NO: 93306 - protein, 412 aa, unidentified
  source 1..412: note = Archangium violaceum
  REGION 1..412: note = tr|A0A084SXI5|A0A084SXI5_9DELT Isochorismate synthase OS=Archangium violaceum Cb vi76 OX=1406225; GN = Q664_10780 PE=4 SV=1
MVGNSCASRMLAAQLLESYEAGSSFFFASPKRTLLARGTFATVPHSGGTNGGTNALARLPERVAAVLNEAREADHDIPVAVGAVPFDSSIPAQLVVPMTLQRAGPLEFGSDVPAQRPLAERYTVQPVPEPAAYLNGVSRALELMGSGPLRKVVLSRALQLSTATPIDLRQLLRNLARRNPSGYTFAVDLPPLKGSAPEAGRRTLIGASPELLVSRSGFQVVANPLAGTTPRSADPVEDQERAAALRVSPKDLHEHAVVIDSVAEALRPYCKNLVVPKEPSLVSTPTLWHLSTRISGELLDPSISSLTLAVAMHPTPAVCGYPAELAHEAIGSIEPFERGFYTGTVGWCDANGDGQWAVTIRCAEAGENSLRLFAGAGIVAGSKPESELAETEAKFRTMLQAMGLGQGVEVQR

SEQ ID NO: 93307 - protein, 452 aa, unidentified
  source 1..452: note = Ardenticatena maritima
  REGION 1..452: note = tr|A0A0M8K917|A0A0M8K917_9CHLR Menaquinone-specific isochorismate synthase OS=Ardenticatena maritima OX=872965; GN = menF PE=4 SV=1
MLREETMTSHLSTRQGGRFPNLNTPVVLTRRCAPIAPHALLHVGKGHARFFWQTPQGQTVAAFGVMHRLQTRGADRFVHMAAAAQNVLANLRTTGAPDAPAPLLVGGFAFDNRQAYGWEGFAPADFILPRVVLRTDERGTWLSVCAEDETKAEKLWQAVVEAVHRAPAVGATTLPRIQHETRAPDEHTWREMVQQAIESIRADVVQKVVLARTCRVQTNAPVDPLAALARLQARYQGCFIFLVEPTPGHAFFGATPEILADVQGTTLRTMALAGSIGRGATPEEDAARAAELLNSAKDRREHAFVVQAILRHLRHLAHDITSAPAPSLLRLPNIQHLHTPITATLNADVRIWDVVAHLHPTPAVGGVPRERALALIHELEPFARGWYAAPVGWVDAEGDGTFVVAIRSALAVARTLTLYAGAGIVADSDPQREWHETGLKFRPLLEAIGIHS

SEQ ID NO: 93308 - protein, 369 aa, unidentified
  source 1..369: note = Arenibacter algicola
  REGION 1..369: note = tr|A0A221V2K0|A0A221V2K0_9FLAO Isochorismate synthase EntC OS=Arenibacter algicola OX=616991 GN=entC; PE = 4 SV=1
MSLGFLDQIEEHFRQGLPFVAYRKPNKAEVKVIFQNDRELHYTNNFTESGFVFAPFDGVGPAVLIKEDEALEETFESEPVNAINPISPSLDQDSDKDFYLKLIEQAIKSIDSGNLKKVVLSRSIEVGTSKTPFVMFSDLLLQYPKAFCYIWFHPKIGLWLGATPEIFLETENNKFRTMSLAGTQLHKVGEAPIWKEKELEEQEMVTQFIQSSLKDKVSSLEVSEAMSIRAGNLWHIKSSVSGNMNNSRLQEIIEVLHPTPAVCGLPKNAAKEFILENENYERQFYTGFLGELNFKEDIRRPSTRKNQENMAYRTIKNRTSLYVNLRCMQVLENKVKVYVGGGITSRSVPDKEWQETLDKSRTMLNIVLK

SEQ ID NO: 93309 - protein, 366 aa, unidentified
  source 1..366: note = Arsenophonus endosymbiont
  REGION 1..366: note = tr|A0A3B0M3G4|A0A3B0M3G4_9GAMM Isochorismate synthase MenF OS=Arsenophonus endosymbiont of Trialeurodes vaporariorum OX=235567 GN=menF_1 PE=4 SV=1
MVNITEFMASVHQFLSEQQIDAGSVRQYEFPLPADITFPALDWLASQQFYTQFYWYHRDGHEEAVLLGEVKHFSNIADAEQFLQQQTAIPTMRIWGLNAWQPLPDNEYYADFVGNDSYLFLPRIEFRHRQEKWILAINIIDQQDLPDALQFLSKLQSVKPILPINSRIKRIQHLPEYQQWHDLTTQAVELINSGVMDKVVIDRQTDIPLTKPLNPASLLSASKAVNGQSYHFMMSFNAQHTFLSSTPERLYYLKFQQLYTEALAGTVVNSSDPIVRKTNSDWLMHDDKNQHENLLVVEDICQRLHNNSEKIDVSPPDIILLRKIQHLRRLIHVTLHHASDSECLYRLQPTAAVAGVPRKIAKHFLQ

SEQ ID NO: 93310 - protein, 431 aa, Arsenophonus nasoniae
  REGION 1..431: note = tr|D2U4H1|D2U4H1_9GAMM Isochorismate synthase MenF; OS = Arsenophonus nasoniae OX=638 GN=menF PE=4 SV=1
MVNISEFMASVYQFLSERQIEGKSGQQYQFSLPADIQFPALDWLASQQFYPQFYWHHRDGHEEVALLGEVKHFTNIVDAEQFLQQQSATTTMRIWGLNAWQPLPDNEYYAGFVGDESYLFLPRVEFRYCQERWILAVNIIDQQDLPHALQFLAELQLVKPISPLNSHIKQVQHLPEYQQWRDLTTQAVQLINSGVMDKVVIARQTDIQLTKPLNAASLTSASKAVNRQCYHFMLSFNAQHTFLSATPERLYYRKFQQLYTEALAGTVVNSSDQAIRQTYSDWLMNDDKNQHENRLVVEDICQRLQNNCEKISVSSPDIILLRKIQHLRRLIRVTLRDASDSDCLNRLQPTAAVAGVPRKTAKHFLQQNEPICRGWYAGSAGYLSLNQSEFVVSLRCAHLNDDHLRLYAGAGIVNDSDPWQEWLEVENKAAG

SEQ ID NO: 93311 - protein, 454 aa, Arthrobacter agilis
  REGION 1..454: note = tr|A0A1Y3LXN7|A0A1Y3LXN7_9MICC Isochorismate synthase OS=Arthrobacter agilis OX=37921 GN=B8W74_06710; PE = 4 SV=1
MSTPSLTALTPAPGQSRGLRSITMARGDMDPRTGLLDYVVRNDAHTWIRRGGGLVAYGETARFTVTGPDRFTRAQEWWRSELAGAEVEDHLGVPGSGLIAFGSFAFSKTSPHESRLIVPRVVIGCSEGRTWLTYITDDAEAELTAESAEAALAAYLAEPAPDRVPDAADRLGPGVLSEDQYKLAVADGVQHVQAGELSKLVLARDVVAHLGGPVATAQVLRELAVRYEDCWTYAVDGLIGSTPEMLIKVENNTARARVLAGTLDRKNAPQGDPDYPNRVLAGSDKQLHEHQIAIDSLTETLQPFTSSMTSHSEPFVLQLPNVWHLASDVTAELVADERGEVPTSLALVQALHPTAAVCGTPTTVAGALIRQLEHLQRGPYAGPVGWIDAGGNGEWGIALRGAVVETPTRVRLYAGCGIVEGSQPEAELAETWSKFRPMIEALGLTGPSGSSGYQ

SEQ ID NO: 93312 - protein, 446 aa, unidentified
  source 1..446: note = Arthrobacter echini
  REGION 1..446: note = tr|A0A5D0XTW0|A0A5D0XTW0_9MICC Isochorismate synthase OS=Arthrobacter echini OX=1529066 GN=FQ377_01260; PE = 4 SV=1
MSTPSLTALTPAHGQSSGLRSITVAREDLDPRTGLLEYVVRDDAHTWIRRGGGLVGYGEITRFTVTGPDRFTRAQDWWRRELAGAEVLDELGIPGSGLIAFGSFAFSKTSPHASRLIVPEVVVGCTEGRSWLTYITRDPEAELSAAAAEAALAAWLLEPAADRSPSPGDRLAPGVLTEDQYTRAVAEGVEHVRRGELSKLVLARDIVAELERPIATAHVLRELAVRYEDCWTYAVDGLIGSTPEMLIKVENNTAEARVLAGTLDRADAPADDPGYAERVLAGSEKQLHEHQIAIDSLTETLAPFTSSMTSHSEPFVLQLPNVWHLASDVTARLTADDDGHVPTSLALVQALHPTAAVCGTPTTVAGALIRELEHLQRGPYAGPVGWIDAGGNGEWGIALRGAVIETPTRVRLYAGCGIVEGSTPEAELAETWSKFRPMIEALGIRR

SEQ ID NO: 93313 - protein, 468 aa, unidentified
  source 1..468: note = Arthrobacter nitrophenolicus
  REGION 1..468: note = tr|A0A4R5Y8X8|A0A4R5Y8X8_9MICC Isochorismate synthase OS=Arthrobacter nitrophenolicus OX=683150; GN = E2R57_00605 PE=4 SV=1
MTSTIRTLTVPLDGTAFPGGLPSFLVRDDVLCWTRREAGLAGFGEIARFTAAGPERFLEADIWWRHLVIEADVTDHVELPGTGPVAFGSFAFSKTSAHESRLIVPEVVVGVRDSQVWVTQLTLGDGELTEQSALAALDRWLGSGSADTPAAFATVTTAAADSATEAQQGAVPGRAGAAVVRPLPLAAGATLHTGSLSEEAWMEAVTAGVAEIRTGALEKLVLARDVVATIPTGVNAAKVLRELAARYRECWTYGVDGLVGATPEMLIQVEGRTAQARVLAGTLDRRDAHGEDGLPMDYATRVLAGSEKQRHEHEIAIQSLTRQLAPFSEAMNAHDEPFILELPNVWHLASDVKAELTEVEGHVPTCLALINALHPTAAVCGTPTQVAGALIRKLEHLDRGPYAGPVGWLDAAGNGEWGIALRGAVIEGPETVRLYAGCGIVDGSQPEAELAETWAKFRPMLESLGISS

SEQ ID NO: 93314 - protein, 449 aa, Arthrobacter oryzae
  REGION 1..449: note = tr|A0A3N0BJX9|A0A3N0BJX9_9MICC Isochorismate synthase OS=Arthrobacter oryzae OX=409290 GN=D7003_18980; PE = 4 SV=1
MTSAFRTLTVPLDAESFRGGLPSFLVRDDVLCWTRREAGLVGFGEIARFTVTGPDRFLEADIWWRHLVLEAEIEDSVECPGTGPVAFGSFAFSKVSRHASRLIVPEIVVGLLDGRAWLTHMTFDDGDLTEAGALAALHRWLDTAGSSPAVEPSAGRSAGLPHTASAAREASLTTGALDEAGWMAAVTAGVAEIRTGALEKLVLARDIVATVPDGVNAAEILRQLAVRYRECWTYGVDGLVGSTPEMLIQVEGRTAQARVLAGTLDRRDAEGMAGSPLDFAERVLAGSEKQRHEHDIAIQSLTTQLAPFSEAMTAHSEPFILELPNVWHLASDVKAELTEVEGHVPTCLALINALHPTAAVCGTPTMVAGALIRKLEHLDRGPYAGPVGWLDAAGNGEWGIALRGAVIEAPGRVRLYAGCGVVEGSAPEAELAETWAKFRPMLEALGISS

SEQ ID NO: 93315 - protein, 451 aa, Arthrobacter rhombi
  REGION 1..451: note = tr|A0A1R4GV86|A0A1R4GV86_9MICC Menaquinone-specific isochorismate synthase OS=Arthrobacter rhombi OX=71253; GN = FM101_14350 PE=4 SV=1
MNIDLPGSVAPETGSAQMQDAPAPRLRSITIPRAPGQESSLLDLLVRDDSLVWGRRGEGLVGFGEAVRFVADGPDRFRRLRRWWADVSTAAEVQDDVDQPGTGPVAFSSIAFSGTSAHASRLIVPRVLVGRSGDHGWLTLITDDPEAELSAATAEAELAGLLEETSIERDLSPGSDQLVPGRVSEDQYEESVRAGVRAIAAGELTKLVLARDAVAELGSPLAVSQVLRELALRYADCWTYSVDGLIGSTPEMLVKVSGNTARARVLAGTLDRATAPAGDDGYAERMLSGNEKQRHEHRLAIDSLTLELGPLVTGMVSPEEPFVLELPNVWHLASDVEAQLRVHDDGTSPSALDLAEVLHPTAAVCGTPTATAADLILRLEKMDRGPYAGPVGWVDAMGNGEFGIALRGGVIESPTSVRLYAGCGIVAASDPAAELAESWAKMRPMREALNL

SEQ ID NO: 93316 - protein, 451 aa, Arthrobacter sp.
  REGION 1..451: note = tr|J7LXA9|J7LXA9_9MICC Isochorismate synthase DhbC; OS = Arthrobacter sp. Rue61a OX=1118963 GN=dhbC PE=4 SV=1
MTSTLRTLTVPLDVESSSGGLPSFLVRDDVLCWSRREAGLVGYGELTRFNTTGPERFLEADIWWRHLILEAEITDHVDVPGTGPVAFGSFAFSKTSPHVSRLILPELVVGIRDGRAWATQLTFDDGPLTEASVLASVDRWLTEPEPNGDGSASGGPDVGLSPDAIAADGSAGHLSRGSLSEAAWMQAVSNGVEEIRAGKLEKLVLARDVVANLPEGVNAAEVLRQLAARYRECWTYGVDGLVGATPEMLIQVEGRTAQARVLAGTLDRRDADGMDGSPMEYAERVLAGSEKQRHEHEIAIDSLTRQLAPFSEAMNSHSEPFILELPNVWHLASDVKAELADIEGHVPTCLALINALHPTAAVCGTPTLVAGALIRKLEHLDRGPYAGPVGWLDAAGNGEWGIALRGAVIEDANTVRLYAGCGIVEGSQPEAELAETWAKFRPMLEALGIKR

SEQ ID NO: 93317 - protein, 395 aa, unidentified
  source 1..395: note = Atlantibacter hermannii
  REGION 1..395: note = tr|A0A447LRS6|A0A447LRS6_ATLHE Isochorismate synthase OS=Atlantibacter hermannii OX=565 GN=entC PE=4; SV = 1
MEASLAEETQQRAVTLSPDSFFFMSPHRNLATSGCLTRLTAPAADGEDLNGEFQQRLRETFAAARKLGCSRPIVVGAIPFDTRKPSALFVPREYQSFSHSEMLASARTAAPPQLQLTAQQAIPEKTQFLDMVERAAALTATPDVRKVVLSRLIDISTASAPDRHQLLNRLVALNPGSYNFHVPLADGGALIGASPELLLRKENQHFWSLPLAGSARRHPNQTEDKLVGDRLLNSTKDRHEHQLVTQAMRQILAGRSQRLEVPEIPSLITTPTLWHLATAIAGETRSEQENALSLACLLHPTPALSGFPHTVARQVIAELEPFDRELFGGIVGWCDDRGNGEWAVAIRCARLKDNQIRCFAGAGIVPASVAESEWHETGVKLSTMLNVFGLNDRSV

SEQ ID NO: 93318 - protein, 428 aa, unidentified
  source 1..428: note = Atlantibacter subterranea
  REGION 1..428: note = tr|A0A427V794|A0A427V794_9ENTR Isochorismate synthase MenF OS=Atlantibacter subterranea OX=255519; GN = menF PE=3 SV=1
MHSISTALQQIAQQLRAEFPVSPGVRRFAVPVSLNQTDPLAWLASQPVYPQFYWQQRNGDEEVAALGASRHFSTFDAAQTFLASQSDAALRIWGLNAFDTERSALFLPRLEWRRHGGSVTLALTVCSNHSLADDARAALAFIDALTPGEPLPTTPLDCVGERHFPDRAGWTQLINQATDAIAAGQFEKVVAARASDLQFSSPVSAAAFMAASRRVNLHCYHYFMAFAPDDAFLGSSPERLWRRIDSALRTEALAGTVANHPDEAKAQALGDWLMKDDKNQRENMLVVEDICQRLQNAVSSLDVLPPQIVRLRKVQHLRRCIWTELHQPDDSLCLHQLQPTAAVAGLPREPARRFIATHESFVREWYAGSAGYLSLKQTEFCVALRCARVTRQTVRLYAGAGIVAGSQPDEEWQEITNKAAGLRTLLVS

SEQ ID NO: 93319 - protein, 424 aa, unidentified
  source 1..424: note = Aurantimicrobium sp.
  REGION 1..424: note = tr|A0A2Z3S092|A0A2Z3S092_9MICO Isochorismate synthase DhbC OS=Aurantimicrobium sp. MWH-Mo1 OX=1987356; GN = AURMO_01648 PE=4 SV=1
MSVSATRGLRVESVPLTVTPELLNLLSVDSPLLWWRRGDGMVGIGVVETLSFSGKTRIKDAGATWREVAEAATVSDAVTVAGSGLMAFGTFAFRSTSEIPSVLIIPRFVVGQRAGVTWLTRIGFADESAEPLTTESAEQILAEHITASAQLGAAPVVHLSPASLSEAGFTSAVNKAIERIDAGEVEKVVLARELEGTLAGTQDLRVAITRLAESYPDCWTFSVDGLFGSSPETLITVHGRKVTARVLAGTARRGSDTATDLSNAAELASSHKDLDEHGFATRSVVNALTPYAEQLTVSDSPFTLKLPNLWHLATDIAGTLASGSNSLDLVFALHPTAAVAGTPTVAAVEVIDDLEPFDRGRYAGPVGWIGADGDGEWAIALRCAQLTGSTVTAYAGCGIVSDSVPANELVETEMKFRPIVDALS

SEQ ID NO: 93320 - protein, 424 aa, Avibacterium avium
  REGION 1..424: note = tr|A0A379ASB3|A0A379ASB3_AVIAV Isochorismate synthase MenF OS=Avibacterium avium OX=751 GN=menF PE=3; SV = 1
MDNLQSIKQQLIDQISPSLPEQQGIACVQLEIESDLNLLSWLKGQQIYPQFYLNFRDCSQHIAVIGQLRCFSDLNQAQHFIQKSDYPLVGGVEFYGQSQFFLPRLYLEKKQNKLKIQLFIDVTNNFQYEHQACLEALKTFEKSTALNPIQQSIHFVKKQAEQAQWCNWVEKALDQIQQGIVNKIVLANATQFAAEDRLNAYDFLAESERYNFGCYHFLLAENAREIFIGSSPERLYQRQGNQLHTEALAGTALVSESEKETIQQSQWLLQDEKNIYENQLVVDDITHHLTPYSQHIEVSQLGLKTLRQVQHLRRQIVAQIYPEYGDNIFLNAIHPTAAVAGLGRNEALAFLRQTETFDRRWYAGTLGIMQKKWAEFCVAIRSAFIEQQQIRVFAGAGIVEGSIPLLEWQEIERKAFGLISLLQE

SEQ ID NO: 93321 - protein, 424 aa, Avibacterium gallinarum
  REGION 1..424: note = tr|A0A379AYA9|A0A379AYA9_AVIGA Isochorismate synthase MenF OS=Avibacterium gallinarum OX=755 GN=menF; PE = 3 SV=1
MDNLQSIKQQLIERISPTLPTQQGIACVQAEIETDLNLLSWLKGQKTYPQFYLNLRDSTQVVAAIGQVRDFSQLNQAQAFMQQSGYPLVGGVQFYGESQFVLPRLYLQQQENKLNIQLFIDQTKDIEQEHQACLNALKTFEKSTALCPIQQSIHFEKKRAEQREWCEWVEKGLQHIKQGVLNKIVLANETLFQSEGKLNAYDFLGESERYNFGCYHFLFAEAEECIFIGSSPERLYQRQGSQLQTEALAGTALVGENAQETEQQAQWLLQDEKNIYENQLVVDDIKQHLAPYSQHITVSPLGLKTLRQVQHLRRQISAQISPEYGDDIFLNAIHPTAAVAGLGRNEALAFLRQTETFDRRWYAGTLGVMQKEWAEFCVAIRSAFIEQEQIRVFAGAGIVEGSIPLLEWQEIERKALGLISLLQE

SEQ ID NO: 93322 - protein, 424 aa, Avibacterium paragallinarum
  REGION 1..424: note = tr|A0A0F5EXB0|A0A0F5EXB0_AVIPA Isochorismate synthase MenF OS=Avibacterium paragallinarum OX=728; GN = menF PE=3 SV=1
MDNLQSIKQWLMDQLYNASATQQGIACVEYVAEMDLNLLSWLKGQTIYPQCYLHFRDSPTIFATIGKVRSFLSLDLAQAFIQQTTYPLVGGVQFYGECQFILPRLLLLQQENKLKIQLFIDNNQPFAQEYEACAVALKTFEKHTALLPIRQSIHFVKKWAEQAEWCDWVEKALDQIQQGRLNKIVLTNETLFQSEGAIDAKDFLAESERYNVGCYHFLFAENADRVFIGSSPERLYQRIDHTLQTEALAGTALVGETKQETQQHANWLLQDEKNIYENQLVVEDIQQHLAPYSQQIQIAELGLKPLRQVQHLRRQICVQLQPEYGDSTLLAAIHPTAAVAGFRRDEALAFLRQTETFDRHWYAGTFGIMSQKWAEFCVTIRSAFIEREQIRVFAGAGIVEGSIPLLEWQEIERKALGLISLLQE

SEQ ID NO: 93323 - protein, 278 aa, Avibacterium volantium
  REGION 1..278: note = tr|A0A3S4HKH6|A0A3S4HKH6_AVIVO Menaquinone-specific isochorismate synthase OS=Avibacterium volantium OX=762; GN = menF_1 PE=4 SV=1
MDNLQSIKQQLIERISPALPKRQGIACVQAEIETDLNLLSWLKGQKTYPQFYLNFRDSTQVVAAIGQVRDFSQLNQAQAFMQQSGYPLVGGVQFYGESQFVLPRLYLQQQENKLNIQLFIDQTKDIEQERQACLNALKTFEKSTALCPIQQSIHFGKKRAEQREWCEWVEKGLQHIKQGVLNKIVLANETLFQSEGKLNAYDFLGESERYNFGCYHFLFAETEECIFIGSSPERLYQRQGSQLQTEALAGTALVGENAQETEQQAQWLLQDEKNIYSC

SEQ ID NO: 93324 - protein, 401 aa, Azoarcus sp.
  REGION 1..401: note = tr|A0A4S4AAG7|A0A4S4AAG7_9RHOO Isochorismate synthase OS=Azoarcus sp. CC-YHH848 OX=2565932; GN = E6O51_20555 PE=4 SV=1
MNDVIRGVTDARARLLLEDYRAEDPFFFATAEHTLLARGCYATVPPAGDLVELSQVVDEQLQAARRNGHPNPIVVGAVPFDARRPACLSIPREVSFAGPLERGRAATWRPERYEVRPEPEPQAYADAVAEAVRRIRAGGLTKVVLARTLALTGGEAVDVPGLLERLAQRNTHGYTFAARLGGEGGEGDDGAAATLVGASPELLVSRRGLLVRSNPLAGSAARSGDAAEDARRGQALLGSAKDLHEHKVVADAVAAGLRPHCRRLAAPAAPALLHTATMLHLSSDIRGELAEPAANTLRLAASLHPTPAVCGHPGAAAFDLIGRLDAFDRGFYAGLVGWCDADGNGEWVVALRCAEVQGKRMRLFAGAGIVADSDPHSEVAETGAKFRTMLNAIGHVPEGAL

SEQ ID NO: 93325 - protein, 401 aa, Azospirillum brasilense
  REGION 1..401: note = tr|A0A0N7I8W1|A0A0N7I8W1_AZOBR Isochorismate synthase OS=Azospirillum brasilense OX=192 GN=D3868_24800; PE = 4 SV=1
MDVLPLPTGERPPGGRSDPDFAFASRGRVLKAYGVNERLDVALDDRSFADGRWEEALDRAFRRRKAQGVENPILVGTVPFDGRQHARLFIPDHCDYEDAGRMAADPDPVALKAIEETVGRNAFEAAVTQAIGLFRDTALKKVVLSRPLDVEAREAFAPGRLLRALLRQNPGAHVFAAPVAYGQTLVGASPELLIRKTGRTVVSNPLAGSAPRSPSAEVERQRTAALLASTKDRTEHRYVVDAVCAALAGHCSPLSVPDAPSVIRTPTMLHLSTELTGELVDPTVSSLRLAHALHPTPAICGTPTGLARDAIDRLEGYARNWYGGMVGWMDSRGNGEWALSIRCGLVQGRHLRLYAGAGVVADSDPAAEWEETAAKLTTMLNLFGVASAQPSNTDLPVELAS

SEQ ID NO: 93326 - protein, 413 aa, Azospirillum doebereinerae
  REGION 1..413: note = tr|A0A3S1CFJ1|A0A3S1CFJ1_9PROT Isochorismate synthase OS=Azospirillum doebereinerae OX=92933; GN = EJ913_19280 PE=4 SV=1
MDVISPSAGDFPSDGDSPDPDFVFSSQGKVLKSFGIAERLPVALNSPDFTGGAWDERLRNAFRALKAKGVDNPIVVGAVPFDSRQPAQLFIPRRYEIADAARFVRDAGDDGAALEVAGIHETINRRHYESAVGQALDLFRTTALKKVVLSRPLDIEARRLFAPQSLAHALLRQNPGAFVFSVPVAYGQTLIGASPELLIRKTGRNIVSNPLAGSARRSPSREEEERRVKALLGSQKDKTEHRYVVDAVREALSGHCATLSVPEGPSVIRTPTMLHLSTEIAGELADPSVSSLRLAHALHPTPAICGTPTDPAFDAIGRLEGYARNWYGGMVGWMDSQGNGEWALSIRCGLASGRNLRLYAGAGVVADSKPAAEWEETAAKLTTMLNAFGLSAAVATAGSGMAGSEMAGLEMAS

SEQ ID NO: 93327 - protein, 409 aa, unidentified
  source 1..409: note = Azospirillum humicireducens
  REGION 1..409: note = tr|A0A2R4VTS7|A0A2R4VTS7_9PROT Isochorismate synthase OS=Azospirillum humicireducens OX=1226968; GN = A6A40_22500 PE=4 SV=1
MTHLLTMAPLAGHDPLAPLAGAADLADSVVFLSPSERLVGQGIGDQAGPAETDPDPARRVAHLLEAARRAGRAPVVMGAIPFDPSGRSRLVVPRRLDRLSPACWQAALQRLPGPPAPPRLLRSHPRPDPDGYRRAVENGLARIADGELAKLVLARSLDLEVADPIDPCRVLTALIRRHPGSLLYSVPLPAEDGREAGVFLGASPELLVRKAGGRVFANPLAGSIAASPDPAENARRIERLLASGKDRHEHAFAAHAVVETLRPFCRTIELPATPGVVAAGPIIHLSTPIVGELRAPWASALDMALALHPTPAVGGTPTAGAVAAIAELEGFDRGLYAGMVGWCDAAGDGEWAVSLRCAEIRGNRARLFAGAGIVDGSRPEAELEETATKLKTMLTALGLSAAEPTAPGF

SEQ ID NO: 93328 - protein, 483 aa, Azospirillum lipoferum
  REGION 1..483: note = tr|G7ZCG0|G7ZCG0_AZOL4 Isochorismate synthase (Salicylate biosynthesis) OS=Azospirillum lipoferum (strain 4B) OX=862719 GN=pchA PE=4 SV=1
MLSDFLAIRLREALQGARRQAERHGETVLATASAPVEPSAFDLPSLFASRPKRLPAFLWLGTGDHGMVGLDVAWEAVAQGEERFSAIAAAWRRTAKNAVVSGEEGPVALGGFRFDPRRPTSELWRGFPDAVLSVPRFVLRLRHGRGQVIVSDAVDHATDIEARFTALLDAWSRLRELNRNPDSTESAMPELRERPGDRPAWTALVDRAVATIGRGELEKVVVARTVDMTFSAPVPTGSVLDRLRDANPKASVFAFERHGACFAGATPETLLTMENHAFQTMALAGSIGRGADPDEDGRAGERLLGSAKDRREHRLVVETLRRALEPFCTEIHTDAAPTLHKLPRVQHLMTRFGGRVRGGTSLIELVGRLHPTPAVGGVSLETALDFLRRHEDLDRGWYASPVGWIDTDGNGEFMVALRSALIDGRRATLFAGCGLVAGSEPDSEYRETLLKFVTMADALGLRELAVRAVPAPRTQTGTRPRPL

SEQ ID NO: 93329 - protein, 478 aa, unidentified
  source 1..478: note = Bacillaceae bacterium
  REGION 1..478: note = tr|A0A3E0JYY4|A0A3E0JYY4_9BACI Isochorismate synthase MenF OS=Bacillaceae bacterium OX=1889774 GN=menF; PE = 3 SV=1
MEGSSLVSIPCSDTLRDKVANAVNHVKKYSHPIILSYVFEIKEKDPLQIFSSFQSAYAGKRFYWATPDRTFILCGIGVELELTTDKKFSNRFFDIYSKWKDWKEHIQIEGAHPIGTGPLLFGGFSFDPLKNANSSKWKPFHEARFTLPSFMITKIGRHTLATINRVIQSTDDINEIINHFNTYEYTLKKKNEDTNSFLNFTIKKESLFYKKEWMAAVEKATEQIKQNRFEKVVLAREMLLEFEGSIDIHYVLSMLNEHQPNCYLFVVENEGKTFVGATPERLVSKRDQKVQSACVAGSIKRGKTVEADEEYAQMLLSDTKNIHEHQIVVKAIEKVFREYCQEVQLQNNPTILKTPNIQHLYTPVEGTVKKGFTLIDFVEKLHPTPALGGYPKDAALAFIRNEEPLERGWYAAPVGWMDDQDNGEFVVAIRSGLLDEQKAYLYAGCGIVGDSKPEEEYRETEIKFGPMQHALGGKLNEK

SEQ ID NO: 93330 - protein, 461 aa, unidentified
  source 1..461: note = Bacilli bacterium
  REGION 1..461: note = tr|A0A0K0GBT4|A0A0K0GBT4_9FIRM Isochorismate synthase MenF OS=Bacilli bacterium VT-13-104 OX=1637974; GN = menF PE=3 SV=1
MIELKEEQVETILEKAIEGINSDDDYQLVSITKKIKNTNALSFFESAKYINKNRTFWMSSEEDFYLVGIGQAYEIIAEESRFEETKKAWNQLLEKATIYNPYEQPGTGIVALGGLSFDPKKPTTPLWENFKPSHFTVPEFLMTKHNRECYLTVNILVRKNDHPRQLANECRDLENSLFQKSTIEKQMLTIKEKKEIEPTEWKETVQKAKEKINHSDIEKIVLAREMCLRFNENANIGPILQKLLDTHPSSYIFAIEKDDHCFLGATPERLVKLEKDHLLSTCLAGTAPRGKTKEEDQAISEGLLHDQKNREEHDFVVKMIKNAIKDCCTHLDVPNEPIIYPLTNLQHLYTPVTATLKKEYSLFDIIEKLHPTPALGGTPKEASLQFIREYERLDRGWYGAPIGWLDSNQNGEFAVAIRSALIKDTEASLFAGCGVVKDSNPDEEYEETNIKFLPMLSVLGG

SEQ ID NO: 93331 - protein, 474 aa, Bacillus aerius
  REGION 1..474: note = tr|A0A3A9DNG8|A0A3A9DNG8_9BACI Isochorismate synthase MenF OS=Bacillus aerius OX=293388 GN=menF PE=3; SV = 1
MVTTVQRTFLREAPEALNIVKKVNHAVLISYSRKIESIDALSFFINGEEQFAGKRFFWSDPDGGLTLVGLGKEISVSTDLKDAGRYQAVHEKWERLKEKTFHFHEDQCTSQAAVGPLLFGGFSFDPLEDRKQHWNGYQEGAFFIPTAMLTQDGEETFITVNRWKAPEENVRKVLEEIKGAASQLIKADASRYPENGHARFTAKEELDVPEWLEAVRRATDDIKNGKYDKVVLAREILLTFDQPVELHRVLFNLMSEQKTSYIFAIEENGKSFVGASPERLVKKDGDNVLSTCLAGSIKRGESEQEDRMLGLELLNDEKNLIEHDIVVNMIHQALLSNCSNIKKPAKPGLYKTKNVQHLYTPIVGKMNAESSLFDLIEKLHPTPALGGAPQQKAIEVIRVLEPMSRGWYAAPAGWIDMSGNGEFAVAIRSGLIDSKEARIFAGCGVVADSDPHMEYEETQIKMKPMLSALGGDIR

SEQ ID NO: 93332 - protein, 472 aa, Bacillus aerophilus
  REGION 1..472: note = tr|A0A410KN29|A0A410KN29_9BACI Isochorismate synthase MenF OS=Bacillus aerophilus OX=293389 GN=menF; PE = 3 SV=1
MVTTVQSTFRQEALATLEEANNVNHAVLISYSRRVDDLDPLAFFQSGEADFLGERFFWSDPESQMIFSGLGRAAVIKSSEQGKERFNIVHQEWEQLKQHMFHFHDEKELKQAAVGPLLFGGFSFDPYEEKARHWEAFGEAHFFVPSMMLTVSKEGTFLTINEWNEVDGNVHQLIQELEQKASNFDALPVRNHGQAELVHMEELDVQEWMKAIHEATEHIRVNEYEKVVLAREVLLHYKNQIELAPLLAELLKHQTTSYVFAIEQGRQAFVGATPERLVKKSGGEVFSSCLAGSIVRGQDEVEDQALGEELLCDEKNLIEHQIVVNMIEQAFEANCHHVHKPNQPSLYKTKNIQHLFTPIVGEIKSSCSLFSLIEQLHPTPALGGYPKEKAVEVIREIEPLKRGWYAAPVGWIDSKDNGEFAVAIRSGLIEEDQVRLFAGCGIVEDSLAKQEYEETQVKLRPMLSALGGRPIE

SEQ ID NO: 93333 - protein, 464 aa, unidentified
  source 1..464: note = Bacillus albus
  REGION 1..464: note = tr|A0A1J9TP76|A0A1J9TP76_9BACI Isochorismate synthase OS=Bacillus albus OX=2026189 GN=BAU25_27380 PE=4; SV = 1
MIQTKQIGLQEVLSAAIKRATDEKVLVSFVKQIDWMDPLLFYAAGKRIAFENRCYFADPAQHVIFAGIGSVFTIATASHKRFQTARDEWDKVKEKAFVQRERYEFGTGPLLFGGFSFDQEKEKTDLWKEFDDTTFSLPAFLLTVKNEKAWLTMNTFVSATDCAETLYNEIVSLEEKIFGESKCALEGSKLTVTSKVEVDPKGWMKAIEKVQDEMKQGNVQKVVLARELKVEMDHHIDSALVLEALRIGQPDCYVFSFDYKGACFLGATPERLIRKEGEKFTSMCLAGSTGHGQSIEESKRNSNALLHDEKNLAEHGYVVNMIRGVLNEHCEYVNIPESPGLLTTKNLIHLYTPVEAKGDASLLTMVEELHPTPALGGTPRLEAMKLIRDVELLDRGLYGAPIGWIDDEGNGEFAVALRCGLLNGEKASLFAGCGIVIDSVPQLEYEETSLKFRPMLGALEELMK

SEQ ID NO: 93334 - protein, 472 aa, Bacillus altitudinis
  REGION 1..472: note = tr|A0A5D4P9E8|A0A5D4P9E8_9BACI Isochorismate synthase MenF OS=Bacillus altitudinis OX=293387 GN=menF; PE = 3 SV=1
MVTTVQSTFRQEALATLEEANNVNHAVLISYSRRVDDLDPLAFFQSGEADFLGERFFWSDPESQMIFSGLGRAAMIKSSEQGKERFNIVHQEWEQLKQHMFHLHDEKVLKQAAVGPLLFGGFSFDPYEEKARHWEAFGEAHFFVPSMMLTVSKEGTFLTINEWNEVDGNVHQLIQELEQKASNFDALPVRNHGQAELVHMEELDVQEWMKAIHEATEHIRVNEYEKVVLAREVLLHYKNQIELAPLLAELLKHQTTSYVFAIEQGRQAFVGATPERLVKKSGGEVFSSCLAGSIVRGQDEVEDQALGEELLHDEKNLIEHQIVVNMIEQAFEANCHHVHKPNQPSLYKTKNIQHLFTPIVGEIKSSCSLFSLIEQLHPTPALGGYPKEKAVEVIREIEPLKRGWYAAPVGWIDSKDNGEFAVAIRSGLIEEDQIRLFAGCGIVEDSLAKQEYEETQVKLRPMLSALGGRPIE

SEQ ID NO: 93335 - protein, 470 aa, Bacillus amyloliquefaciens
  REGION 1..470: note = tr|A0A4V7TSK1|A0A4V7TSK1_BACAM Isochorismate synthase MenF OS=Bacillus amyloliquefaciens OX=1390; GN = menF PE=3 SV=1
MVTTVQHTFREEADHALHKAKQVNHAVLLSYSRRIASLDPLSFFKDGAKKYKGKRFFWSEPGSELTIVGLGTEALFQSNEKNKKRYHDVFEQWERFKKTAFHIHEEEAAHTAVGPVLFGGFSFNPAEERGDEWNGFEEGLFFIPSLMLTKTADGDYLTVNQWAADGNQAEDVLKRLKSFSEAFAVSSMAYEEYPALTKAEELDVENWLEAINTATNDMKANQYDKVVLAREVVLSFDGPIPVESVVRKLLTDQTTSYVFAIEQGNKCFVGASPERLIKKSGKDVMSSCLAGSIKRGKNQQEDDCLGNELLHDGKNLAEHDFVVQMIHDAFLSSCSDVKKPAGPQLYKTKSVQHLYTPIVGHLKTSASLFDLIEKLHPTPALGGAPQQKAVEVIAEIEPMTRGWYAAPIGWMDGRENGEFVVAIRSGLIEDKSARLFAGCGIVEDSDPQSEYEETQIKLKPMISALGGERL

SEQ ID NO: 93336 - protein, 399 aa, Bacillus anthracis
  REGION 1..399: note = tr|A0A2A7D6S5|A0A2A7D6S5_BACAN Isochorismate synthase OS=Bacillus anthracis OX=1392 GN=CON16_19245 PE=4; SV = 1
MNEHTAVKELSEKLLEDYKTESSFFFASPTRTILAEGEFTTVKHREIESFSELVQATLSNAKQAGNPNPIVVGALPFDRRKEVQLIVPEYSRISERLQLDTTNQLETNENATFEMTPMPDPEVYMNGVKQGIEKIQDGDLKKIVLSRSLDVESSAKIDKQKLLRELAEHNKHGYIFAVNLPKDEKENSKTLIGASPELLVSRNGMQVISNPLAGSRPRSEDPVEDKRRAEELLSSPKDLHEHAVVVEAVAAALRPYCHTLHVPEKPSVIHSEAMWHLSTEVKGELKDPNTSSLQLAIALHPTPAVCGTPMEKAREAIQHIEPFDREFFTGMLGWSDLNGDGEWIVTIRCAEVQENTLRLYAGAGVVAESKPEDELAETSAKFQTMLKALGLRDSSLNEK

SEQ ID NO: 93337 - protein, 469 aa, Bacillus aquimaris
  REGION 1..469: note = tr|A0A1J6W023|A0A1J6W023_9BACI Isochorismate synthase MenF OS=Bacillus aquimaris OX=189382 GN=menF PE=3; SV = 1
MVTIHKTNIEKAFDTAMEKARQYRRPVLFSIVEKIDAVDPLSFYNEGKVLYEGTRFMWKDRDHTITIAGLGAACTISTEEEKDQFFAVEKEWKRFIEYGVILSLENWAGTGPLLFGGFRFDPLNQRGSEWDEFADGTLQVPSIMLTKSKEADYLTVNMLCGSHHDEDSLDKLMRIKDELISKSKFPTVPDETTVSEVEDYKPEEWKTSVQNVVDELRGGSMEKVVLARKCKVSFDAPVTSDFVLDNLWKQQPDSFIFSFERNGSCFIGATPERLVKKTGEEVLSTCLAGSIARGQTIEEDEMLGAELLNDEKNRYEHHLVVENIHQALEPFCSDLSLPEQPGLMKMKDIQHLYTPVTGRASKQTSLLDMVEKLHPTPALGGVPREEALHVIRQEEKMDRGLYAGPSGWLDAYGNGEFAVAIRSGLLQGKESYIYAGCGIVADSDPETEFKETQMKFRPMLRALGGNING

SEQ ID NO: 93338 - protein, 473 aa, Bacillus aryabhattai
  REGION 1..473: note = tr|A0A1S2BY46|A0A1S2BY46_9BACI Isochorismate synthase MenF OS=Bacillus aryabhattai OX=412384 GN=menF; PE = 3 SV=1
MIATTEQLVQEYIKDAIECAKNENQPKLVSLVKKVRPIDPLIFYANGHDQFYKERFFWKDPNSYYTFVGLGYAHTICTNAAKERYFHIENEWKRFIKEDFYKNNQIFPDGTGPLLFGGFSFDPNQYRENYWSDFPSSKFMIPTVLYTQVDKEGYLTVNMMVKGQDSVKEHINYFEEVQKLVRCEEYDGESHISPLLLEKEEIGVEKFKGNVERATTLIKQQAIEKVVLARQLKVKFNEDISTEYVLQRLLKEQPTSYTYILEGENQHFIGASPERLVQKQGDYVFSTCLAGSIPRGKTRQEDHELGEELLQDPKNLIEHDVVVHMIKEAMNSYCYEVEIPSKPSLYKTKHIQHLYTPVKGRIKEDVTLFSFIQKLHPTPALGGYPQQEALPIIRKLESFDRGWYAAPLGWMDINGNGEFIVGIRSAVIQQKEAVLFAGCGIVADSTPESEYEETRIKFNPMLSALGGIMRGTH

SEQ ID NO: 93339 - protein, 469 aa, Bacillus asahii
  REGION 1..469: note = tr|A0A3Q9RQG1|A0A3Q9RQG1_9BACI Isochorismate synthase MenF OS=Bacillus asahii OX=228899 GN=menF PE=3; SV = 1
MAISEETEQLQGLAFAMQRAKERNESVLFSHVKKIEYKNPLSFYQAGREQYAGERFFWQDPAKEITITGLGNIKKLQATASANRYKQVEKCWLKLQNAAVQSGVRDVDATGPLLFGGFSFDYEQSSSLLWNQFGDNLFYIPAYMLSIVKGEAYLTTNILCSPEDQEQLFIHMINEREEFLVERLENKEVPTNALVEQREIRPTEWKQTVAKAVDEMRRSDLDKIVLARELRVVFQDRIVSEKVLETLMVEQPTSYIFSFEAGGDCFIGATPEQLIKKKGNEVFSVCLAGSIARGKSEEEDTRLGNELLHDSKNRMEHQYVVSMITNALQTLCEEIIVPDEPELMKIRHIQHLYTPVKGMCVGDATIFDFVEKLHPTPAMGGLPKEKAIVRIREIEGLERGLYAGPLGWVDSYGNGEFAVGIRSALLQGNEASLFAGCGVLEDSLPESEYQETGIKFNPMLSALGGHLHD

SEQ ID NO: 93340 - protein, 415 aa, Bacillus atrophaeus
  REGION 1..415: note = tr|A0A0H3E797|A0A0H3E797_BACA1 Isochorismate synthase DhbC OS=Bacillus atrophaeus (strain 1942); OX = 720555 GN=BATR1942_13815 PE=4 SV=1
MSEQHVISEEKAEQLLSQYRAGSFFLSTPHRTLLAEGAFAEVPNRDGHEDQLKDLPGRIAAVLNEAKECGHSNPAVVGAIPFDYTKPAKLIVPTNIRWSGPLQLDPAGRHQQPPENTYEMQPVPEPAEYMRGVERGLERIEAGDLSKIVLSRSLQLTSPKPIHIESLLHHLAQHNTNGYTFAADVSKQETDSADLGASPSRRTLIGASPELLVSRSGTQVVSNPLAGSRPRSEDPVEDQRRAAELLSSAKDLHEHEVVADAVAAALRPFCRTLDVPAEPSLVQTETMWHLSSEIRGELSDPSTSALELAIALHPTPAVCGTPTDSAREAIKEIEPFDRGFFTGMVGWCDSEGDGDWVVTIRCAEAEDYALRLFAGAGVVKGSKAEDELAETSAKFRTMLLAMGLKNDLLKSLLEG

SEQ ID NO: 93341 - protein, 393 aa, unidentified
  source 1..393: note = Bacillus australimaris
  REGION 1..393: note = tr|A0A0P7FY26|A0A0P7FY26_9BACI Isochorismate synthase OS=Bacillus australimaris OX=1326968; GN = AKG37_09180 PE=4 SV=1
MKHSLLSSEEKVQLLQDYQPGAFFLASPKRTILAEGIFKHIETNQLNELSTKVAHVFDAAKQAGIQAPIVAGAVPFDPVQPVRLNVPVHVQFSDPLEFQQADEEPEEVSPSYEVTPVPAPDVYMEGVNEGLAKIESGELSKIVLSRSLHLKSNQEIHTKAILERLARHNTTGYTFATNVADPASSEKRTLLGASPELLLSKTGSSVISNPLAGSRPRSSDPVEDKRRHDELLTSAKDLHEHAVVVEAVTKALAPYCHTLDVPASPSVIQTETMWHLSTVVKGELADPNVSSIDIALSLHPTPAVCGTPTADAREAIQAIEPFDRGFFTGMIGWADENGDGDWIVTIRCAEAEGQSLRLFAGAGVVKGSKAEEELAETSAKFNTMLHAMGIHQR

SEQ ID NO: 93342 - protein, 467 aa, Bacillus azotoformans
  REGION 1..467: note = tr|A0A072NJW4|A0A072NJW4_BACAZ Isochorismate synthase family protein OS=Bacillus azotoformans MEV2011; OX = 1348973 GN=M670_03131 PE=4 SV=1
MVTIQQSTLHKKIAYGVEQAKSLSHSILVSASTKVDLIIDPVTFYEKGKNRTGKRTFWSTPSGDFVMVGIGNAYTFESNGGNNFEQVEKEWIELNENSVMEPKERVPGVGPVILGAFSFDPRKEKTKLWDSFPVSKMMLPQHLLTITRNEFWLTVNVIVQADTNVDEMAELLLTEQKNLCKDAYIPYKCSIGKEFIIEEVTKDEWIASVDTVAGQIRDKKIEKVVLAREIRVKSDFPFITEDILDRLRKEQPSSYIFALESGQDCFIGASPERLIKKEGAEAFTTCLAGSTARGTSEEEDARLGNELLQDQKNLHEHEVVVRAIRSAFEQGCDRVVIPEKPTLYKVRDIQHLYTPIVGKVKDTVSLLTLVEKLHPTPALGGYPREEALRKIREIEDLDRGLYAGPIGWLDSSGDGEFAVGIRSGLLQGKEASLFAGCGIVGNSDPISEYKETQMKFKPMLSALGGSF

SEQ ID NO: 93343 - protein, 464 aa, unidentified
  source 1..464: note = Bacillus bacterium
  REGION 1..464: note = tr|A0A506QC53|A0A506QC53_9BACI Isochorismate synthase OS=Bacillus bacterium OX=2053512 GN=FJ659_09290; PE = 4 SV=1
MIQTKQIGLQEVLSAAIKRATDEKILVSFVKQIDWMDPLLFYAAGKRIPFENRYYFADPAQHVIFAGIGSVFTIATSSHKRFQTTRDEWDKVKGKAFVQREKYEFGTGPLLFGGFSFDQEKEKTDLWKEFDDTTFSLPAFLLTVKNEKAWLTMNTFVSATDCAETLYNEIVSLEEKIFEESACALEGSKLTVTSKVEVDPKGWMKAIEKVQDEMKQGNVQKVVLARELKVEMNHHIDSALVLEALRIGQPDCYVFSFDYKGACFLGATPERLIRKEDEKFTSMCLAGSTGHGQSIEESKRNSNALLHDEKNLAEHGYVVNMIRSVLNEHCESVNIPESPGLLTTKNLIHLYTPVEAKGDASLLTMVEELHPTPALGGTPRLEAMKLIRDVELLDRGLYGAPIGWIDDEGNGEFAVALRCGLLNGEKASLFAGCGIVIDSVPQLEYEETSLKFRPMLGALEELMK

SEQ ID NO: 93344 - protein, 471 aa, Bacillus badius
  REGION 1..471: note = tr|A0A0C2Y7B7|A0A0C2Y7B7_BACBA Isochorismate synthase MenF OS=Bacillus badius OX=1455 GN=menF PE=3 SV=1
MSTIKSQPIKEAFVQSILEKQHNKRTSLFSYVEKIDWIDSLQFYQSGRALYAGERFFWKDRDGEVEIVGLGNIYTIRNEKTDRSRYAETEEKWNDMIKCSFIHNSFDAYGVGPVLFGGFSFDPKQEQEEEWSKFSSAFFYLPEYMLTIYEGECYLTTNVICPSDELEELIDKLESKKDWLLTQASAQQPDEHKQFAYIKEQNTEQWKKAVNEAVKQIRSDDELKKVVLARKIVAGFNQEIDQDNVLERLMKQQPDSFVFSLEAMESCFLGASPERLVRKRNDIALSTCLAGSIKRGRTDEEDDALGKELLDDEKNRIEHDYVVQMIKREMEALCQTVNIPSAPGLMKVRDIQHLYTPVTGITDEGRSILQFVERLHPTPALGGLPNDKALPVIRRLEEMDRGFYAGPVGWMDYRKNGEFAVAIRSGLLSKQQAFLYAGCGIVADSEAESELAETRIKFRPMLRALGEMADE

SEQ ID NO: 93345 - protein, 399 aa, unidentified
  source 1..399: note = Bacillus bombysepticus
  REGION 1..399: note = tr|A0A023P755|A0A023P755_9BACI Isochorismate synthase OS=Bacillus bombysepticus str. Wang OX=1330043; GN = CY96_10640 PE=4 SV=1
MNEHIAVKELSEKLLEDYKTESSFFFASPTRTILAEGEFTTVKHREIESFPELVQATLSNAKQAGNPNPIVVGALPFDRRKEVQLIVPEYSRISERLQLDTTNQLETNENVTFEMTPVPDPEVYMNGVKQGIEKIQDGDLKKIVLSRSLDVKSSEKIDKQKLLRELAEHNKHGYTFAVNLPKDEKENSKTLIGASPELLVSRNGMQVISNPLAGSRPRSEDPVEDKRRAEELLSSPKDLHEHAVVVEAVAAALRPYCHTLHVPEKPSVIHSEAMWHLSTEVKGELKDPNTSSLQLAIALHPTPAVCGTPMEKAREAIQHIEPFDREFFTGMLGWSDLNGDGEWIVTIRCAEVQENTLRLYAGAGVVAESKPEDELAETSAKFQTMLKALGLRDSSLNEK

SEQ ID NO: 93346 - protein, 468 aa, Bacillus boroniphilus
  REGION 1..468: note = tr|W4RNX3|W4RNX3_9BACI Isochorismate synthase MenF; OS = Bacillus boroniphilus JCM 21738 OX=1294265 GN=menF PE=3; SV = 1
MVAIQETELRQGILDAIERAKGQSQSVLVSEVHNLDCIDPFYFFASGREKFFGERFFWKDPEGDHFLTGLGICGQIQSDQGADRFFHVEKEWKRFKDTALVFNKHNVNGTGPSIFGGFTFDPLKKKTGLWSKFSEALFHIPKYMLTIVKGEAYLTTNVVCTQHDDMSLFDKVTREREEVLSKGGQKPVLARLDLKDIIEIDPEAWKKTVTDVVDGFENSELKKVVLARELRLHFTDEVQSESVLADLLENQQASFTFAFESNGDCFIGASPERLVKKDGASLFSACLAGSIARGSTPEEDENLGEELLTDEKNLIEHQYVVDMIKGAMEETCDEVLLPEQPVLMKMKYIQHLYTPVIGKNREGTSLLHLVNRLHPTPALGGLPKQAAIVKIREIEQLDRGLYAAPVGWMDYQGNGEFAVAIRSGLIQGNEASLFAGCGIVADSNAESEYKETSIKFRPMLAALGGKIT

SEQ ID NO: 93347 - protein, 469 aa, Bacillus butanolivorans
  REGION 1..469: note = tr|A0A2A7WG51|A0A2A7WG51_9BACI Isochorismate synthase MenF OS=Bacillus butanolivorans OX=421767 GN=menF; PE = 3 SV=1
MAISEETEQFQGLASAIQKAKDLNGQVLFSHIKKINCNNPLSFYQAGRERYAGERFFWEDPAKDITITGLGNVKKLQAASNADRYREVEMSWIKLQNAAVKTGVTDVEATGPLLFGGFSFDYETNSTLLWNQFGDNLFYIPAFMLSLVGEQAYLTTNLLCSPDDSEKLFIDMINERESFLIESLNGTELRANTLVKQKEVKPKEWKQTVAEAVEEIKTTDLDKIVLARELRLVFERSIDSEKVLEQLIAEQPLSYIFSLEAGGDCFVGATPERLIKKQGNEVFSTCLAGSMGRGKTEEEDACLGNELLHDQKNLQEHQYVVSMISNAFEAVCEKVIVPTEPKLMKNRHIQHLYTPVRGICNEGVTIFEFVENLHPTPAMGGLPKEEAVARIREIEGLERGFYAGPLGWVDAYGNGEFAVGIRSALLQDNEASLFAGCGVVEDSTPESEFQETGIKFNPMLSALGGNLNE

SEQ ID NO: 93348 - protein, 458 aa, unidentified
  source 1..458: note = Bacillus caldolyticus
  REGION 1..458: note = tr|A0A2H5KJY4|A0A2H5KJY4_BACCL Isochorismate synthase MenF OS=Bacillus caldolyticus OX=1394 GN=menF; PE = 3 SV=1
MAIGFRHHLQQQLHRLAVNAGRPFVSWAEPWEGVDPVSFFMQGPSCGFRERFFWADRTGGTILVGLGSVYAIETEKADSRFDDVEAGRRRWKKEMEPYGAADAPPLLFGGFSFDPYRPGTDMWRGFPAGKLVAPAALLAVRNGKTTLTVTVPTDKRGRDWERVGRLLERISDPMAAPKRLPRLVSDEEEEKERWLAAVREAIASIRAGALDKVVLARARRLAFAKTVDAAAVLQRLREQQPFAYIFAFEQDGRCFIGASPEQLVQKEGKMCRSVCLAGSVRRGADMEEDERLGAWLRADRKNNEEHQFVVQMIGRLFSSVCETVEMPPAPQLLKLPHIQHLCTPVVGRGCRERSVLRLVEMMHPTPALGGTPRDRALEVIRALEPLDRGWYAAPIGWVDGEGNGEWAVAIRSALLAGKEAMLFAGCGIVADSDPNSEYEETNVKMAPMLSALGVMNDG

SEQ ID NO: 93349 - protein, 468 aa, unidentified
  source 1..468: note = Bacillus campisalis
  REGION 1..468: note = tr|A0A0M2SPM7|A0A0M2SPM7_9BACI Isochorismate synthase MenF OS=Bacillus campisalis OX=1408103 GN=menF; PE = 3 SV=1
MVTIQDTELRQGIVAAIGRAKELSQSVLVSEVQKIDRLDSFHFFAAGRSRFLGERFFWQDPHGTYKLAGVGVVRQIQCDKASGRFVHIEKEWKQFIETAVLAGKQDVPGSGPAMFGGFSFDPLKDKTGLWSKFSQSHFHIPAFMLTVLEDEAYFTTNVVCTQHDDASLFDKISEERQAILAAAVREQEYSLPNLEALREIQPEEWKQSVKDLVESLENSGLKKVVLARELRLQFDQDVAVEGVLQRLTEQQRESFIFAFEANGDCFIGASPERLVKKEGEKVFSACVAGSIPRGKTPEEDRQLGKVLLEDQKNLIEHQYVVEMIKEAMQETCDRVVLPDGPKLMKMKYIQHLYTPVTGENRAGTSILDLVDRLHPTPALGGLPKEKAVEKIREIEILDRGLYASPIGWLDHLGNGEFAVAIRSALIQASEASLFAGCGIVADSDAESEYTETSIKFRPMLAALGGIKQ

SEQ ID NO: 93350 - protein, 468 aa, Bacillus canaveralius
  REGION 1..468: note = tr|A0A2N5GPF3|A0A2N5GPF3_9BACI Isochorismate synthase MenF OS=Bacillus canaveralius OX=1403243 GN=menF; PE = 3 SV=1
MVTIQDTELKEGISEAIDRARRLAKPVLVSEVHKLGHIDPLDYFAAGREQYLGERFFWKDPSGQTLIIGLGICKQIQSDQADDRVLQTEKEWKRFIEGSVIYNPYPQPGLGPVMFGGFSFDPLKQKTLLWSKFSDSLFHIPKYMLSIIDGQSYLTTNVVCTQHDDASLAEKVAANRQELLSSAAKTAHYDSAKLLHKEEIDPGDWKNTVSNVVADLQEGSLKKVVLARELRLYFKEAVQVEMVLSRLLKEQRESFIFAFESNGDCFIGASPERLVKKAANQVKSTCLAGSIARGKTLEEDKLLGKTLLTDQKNLIEHQYVVDMIKEAMADACEHVDMPNEPQLLKMRDIQHLYTPVTGRLFQNKTLLSLVKRLHPTPALGGSPKYEALAKIREVEAMDRGFYAAPLGWVDYHDNGEFAVSIRSGLIQGEEASLFAGCGIVADSNAESEYLETGIKFRPMLTALGGRME

SEQ ID NO: 93351 - protein, 476 aa, unidentified
  source 1..476: note = Bacillus cavernae
  REGION 1..476: note = tr|A0A3S0U6H0|A0A3S0U6H0_9BACI Isochorismate synthase MenF OS=Bacillus cavernae OX=1674310 GN=menF PE=3; SV = 1
MERIGGFFLAISHETELIEGLKAALDEAKRKKHKILFSEVVEVDNISPLSFYQVGREQYIGERFFWQDPNKDIIIAGLGKVEKIQVSAADSRFMEVEASWTALIENAVKTGILEKEGTGPLLFGGFSFDHNKSNSLLWDQFGDNLFYIPAFMLSIVKGQAYLTTNLICSPEDHVQLFIKMINERDTLLSGSVNFGNGHHEIIEQREIAPEHWKYTVANTIEEIKGTDLKKLVLAREMRLIFNHSVLSEQVLQKLAVEQQTSFVFSLETGSDCFIGASPERLIKKTGNEMFSTCLAGSIARGKTKQEDDRLGYELLHDQKNLVEHQYVVSMIGEAMKSVCSSVNIPKAPALMKNRHIQHLYTPVKGMCNRFVSIFEMIEKLHPTPALGGLPKEKAVRRIREVEQLERGFYSGPIGWTDSYGNGEFAVAIRSALLQGKEASLFAGCGIVEDSTPEGEYNETSIKFKPMLSALGGNLHE

SEQ ID NO: 93352 - protein, 464 aa, Bacillus cereus
  REGION 1..464: note = tr|A0A5B7VND0|A0A5B7VND0_BACCR Isochorismate synthase OS=Bacillus cereus (strain ATCC 14579 / DSM 31 / JCM 2152 / NBRC 15305 / NCIMB 9373 / NRRL B-3711); OX = 226900 GN =EJ379_24805 PE=4 SV=1
MIQTKQKGLQEVLIAAIKRATNEKTLVSFVKQIDWVDPLLFYAAGKRISFENRCYFADPAQHVIFAGIGSVFTIANSSHKRFQTARDEWEKVKENAFVQRDEYEFGTGPLLFGGFSFDPEKEKTDLWKEFKDTTFSLPAFLLTVKNEKAWLTMNTFVSATDCAETLSNEMISLEEKILGESRCALNGSKLTVISKVEVDPKGWMKAIEKVQDEMKQGNVQKVVLARELKVEMNHSIDSALVLEALRIGQPDCYVFSFDYKGACFLGATPERLIRKEDEKFTSMCLAGSIGHGHSIEESKRNSNALLHDEKNLAEHGYVVNMIRSVLNEHCEYVNIPESPGLLTTKNLIHLYTPVEAKGDASLLTMVEELHPTPALGGTPRLEAMKLIRDVELLDRGLYGAPIGWIDDEGNGEFAVALRCGLLNGEKASLFAGCGIVIDSIPQLEYEETSLKFRPMLGALEELMK

SEQ ID NO: 93353 - protein, 458 aa, Bacillus circulans
  REGION 1..458: note = tr|A0A553SJP2|A0A553SJP2_BACCI Isochorismate synthase OS=Bacillus circulans OX=1397 GN=CEQ21_17290 PE=4; SV = 1
MKESKGLLLEGSELNTSTSILRSKVIKLEQKQDFITIFAQNDQYKGKRFFWKSPDGASVFAGIGICKMLQSNGMEQIYEAIEKEWQELLDGSEINNPFQTAGVGPMLFGGFSFDPKKTRTHLWDNFKDAHFYLPAIMFSEIDGEQYVTVNQYGNGNDLVEAIQACFEELEKSGDTSAVNTSANKLLDSKEINGEQWKMMVTEVVEDLGQSLKKVVLARESRLVFEQDIKTETVLENLLNRQKNSYVFALESDKDCFIGASPERLVKKAGKQVFSVCLAGSIARGMNEEEDYSLGQELMNDPKNRVEHDYVVQMIRSAMEKVCSTFDIPNEPRLLKMRDIQHLFTPVTGTLKKSASVLALIKLLHPTPALGGYPQALAIEKIREAEMLDRGLYGAPIGWLDYRGNGEFAVSIRSALIQKNEASLFAGCGVVKDSDAEMEFKETAIKFKPMLSALGGHLG

SEQ ID NO: 93354 - protein, 443 aa, Bacillus coagulans
  REGION 1..443: note = tr|A0A150JQ44|A0A150JQ44_BACCO Menaquinone-specific isochorismate synthase OS=Bacillus coagulans OX=1398; GN = B4099_2530 PE=4 SV=1
MKEKTAPALKLASRIIKCRTAPDPLRLFTAGAARFYGSRFFWQDKNRETVFVGFGRVWSCTVTASDGFAQMEDEWRNLKGAGEVYPETAETGTGPVLFGGFAFDGTVAKQEWKTFGQGIFRVPQILFTFKKDAVFLTVNGCGGTESVQEAEKTARSLLNGSTAFPALPPLKAVQEMGADEWKKSVATAVQFIREGRMDKVVLARKLELAFDGVTSPDAVLAALSAQQNDSYLFVLEEGSESFIGASPERLVKKTGQHILSTCLAGSIKRGRNEAEDLELGKALLSDQKNLSEHGFVVSMIRQVLEPFCNGLNVPGAPVLMRMRDIQHLYTPVTGTVKDKNTTLFQLVKALHPTPALGGIPRQPAMEAIRLLEKMDRGLYGAPIGWVDYRGSGEFCVGIRSGLLKGDYASLYAGCGVVKESEPEEEYKETSVKFTPMLRALGGK

SEQ ID NO: 93355 - protein, 466 aa, Bacillus cohnii
  REGION 1..466: note = tr|A0A223KUH2|A0A223KUH2_9BACI Isochorismate synthase MenF OS=Bacillus cohnii OX=33932 GN=menF PE=3 SV=1
MVTLQKSKWKHFWNGWDSLNRSKEVLYSYTKKISEINPLQFFHNGSANFKGQRFFWTNRARNEMIVGLGITLQFSSNENGKERYLEIEKRWKQIVANSFCHSPNSHIGPYMFGGFSFDPKRERTPLWEKFAHTEFVLPTVMLTIKDDEAFLTYNFFTDTSKEKVNQTLLLEEALLKDGTHSYGSSELSSFLEMDPIEWKQSIEEVKRRIVAGHMDKVVLARELRTKFLDSINVESVLSILLEEQPSCYVFAFEREDNCFIGASPEQLVQKESEIVKSMCLAGSIARGKTIAEDENLGDTLLSDSKNLQEHDFVVQMISNSLKAVCQQVTTGDRPKLYKLKHIQHLFTSVIGELKDDVSIFQLIERLHPTPALGGYPKEISLETIREVEVLDRGWYAGPIGWMNLKGDGEFAVAIRSALLQEKEASLFAGCGIVENSDPESEYEETRIKFKPMLSALGGIRHHDSNE

SEQ ID NO: 93356 - protein, 403 aa, unidentified
  source 1..403: note = Bacillus cytotoxicus
  REGION 1..403: note = tr|A0A2S1AAC9|A0A2S1AAC9_9BACI Isochorismate synthase OS=Bacillus cytotoxicus OX=580165 GN=CG477_009955; PE = 4 SV=1
MNHTATLNELATSLLRDYKAGSSFFFTSPYRTMLAEGTFATVKHSQAKNFPEIVQSVLKSAKQAGHQNPIVVGALPFDRTKTMQLIVPQETRVTDRLQWDVGEQTQDSSSVHKFKMKPIPMPSEYMRGVEQGIAKIKSGDLKKIVLSRLLDVYSSREIDVQKLLYDLAKHNPHGYTFAVDLPNNEDDTKQKRTRTLIGASPELLVSRRGMQVISNPLAGSRPRSGDPAEDKRRAEELLSSEKDLHEHAVVVEAVAAALRPYCRTLHVPEKPSLIHSETMWHLSTEVKGTLLDESISALELASALHPTPAVCGTPTEKAREAIQEIEPFDREFFTGMLGWSDINGDGEWIVTIRCAEVEENSLRLYAGAGIVAESKPEDELAETSAKFRTMLQAMGLNEDSLEG

SEQ ID NO: 93357 - protein, 467 aa, unidentified
  source 1..467: note = Bacillus deserti
  REGION 1..467: note = tr|A0A2N5M4N4|A0A2N5M4N4_9BACI Isochorismate synthase MenF OS=Bacillus deserti OX=673318 GN=menF PE=3; SV = 1
MNIMENLHKARVAAKETNSSVLFSEVTKIGMLDPLSFYQSGNESYTGDRFFWQDPKKETVLVGIGKIDVFQSSHNQNRYNTIEQRWEKLIDHACIIKNQDVPGTGPLLFGGFSFDSAKNSSLLWDQFGDHLFYIPKYLLSIIDGQAYLTINALIDHEDDLSLLTESDKEKDELLEKALNYVEQPAAQNELLEQIEVCPEEWKDTVQSAINEIRTTDLDKIVLARETRLRFQSDISPAPVLNRLAREQPTSFIFCYESGSDYFIGASPEQLVKKNGTTLSSACLAGSIARGKTAEEDDLLGKTLLHDQKNLIEHQYVVSMIKHAMETICRKVSVPDGPELMKTKHIQHLYTPVSGECTEDISIFDCVEKLHPTPAMGGLPKEKAVERIRELEILERGFYASPIGWTDGKGNGEFAVAIRSALVQGNEASLFAGCGIVEDSEPESEYIETAIKFKPMLSALGGNLHATS

SEQ ID NO: 93358 - protein, 487 aa, unidentified
  source 1..487: note = Bacillus enclensis
  REGION 1..487: note = tr|A0A1C4AIZ3|A0A1C4AIZ3_9BACI Isochorismate synthase MenF OS=Bacillus enclensis OX=1402860 GN=menF; PE = 3 SV=1
MYLIISFDHVRDCLGEFGLVTIHKTNIEKAFDTAMEKARQYRRPVLFSIVEKIDAVDPLSFYNEGKALYEGTRFMWKDRDHTITIAGLGAACTISTDEEREQFFAVEKEWKRFIEDGVILSRENWAGTGPLLFGGFRFDPLNQRGSEWDEFADGTLQVPSIMLTKSKEADYLTVNMLCGSNHDEDSLDKLIRIKDELLSKSKFPIVSDDTTVSGVEDYNPEEWKTSVQNVVDELKGGSMEKVVLARKCKVSFEAPVTSDFVLDNLWKQQPDSFIFSFERNGSCFIGATPERLVKKTGEEVLSTCLAGSIARGQSIEEDEMLGAALLKDEKNRYEHHLVVENIQQALEPFCSDLSLPEQPGLMKMKDIQHLYTPVTGRASKQTSLLDMVEKLHPTPALGGVPREEALHVIRQEEKMDRGLYAGPSGWLDAYGNGEFAVAIRSGLLQGKESYLYAGCGIVADSDPETEFKETQMKFRPMLRALGGNING

SEQ ID NO: 93359 - protein, 467 aa, Bacillus endophyticus
  REGION 1..467: note = tr|A0A329EJQ4|A0A329EJQ4_9BACI Isochorismate synthase MenF OS=Bacillus endophyticus OX=135735 GN=menF; PE = 3 SV=1
MVTSIEEAKRKIEDASLRANKLEKPQFVSIVKQIAQFDPLSVYYNGRHLYEGKRFFWKDAYEPFYLVGFDYAHIIEKNKGRDRFKYVEEEWKRFIEGVKENKTPFGTGNLLFGGFSFHPYQKEDNLWTSFPVSRFYVPKVLFTSYNNEAFITFNRYIKQGESVEDIIKEMEHIEETFLASDILPSQVYERNAVQHEVAPEEWKRAVKHATEQIRSGEIEKVVLARELQITFHEKIWSEYALSRLLEEQNLSYIFAVEQDSQCFIGASPERLVKSVDGEVFSTCLAGSIPRGHSAEEDENLGEELLNDEKNLFEHKLVVNMIEKAMKETCLNVYAPEHPTLYKVKHIQHLYTPIKGKAKEGTTLFELVEKLHPTPALGGYPKEESVEVLEKLEVFERGWYAAPIGWLDGDGNGEFIVGIRSALLRGHEASLFAGCGIVGDSDPQSEYEETKTKFKPMLSALGGMNNDK

SEQ ID NO: 93360 - protein, 466 aa, unidentified
  source 1..466: note = Bacillus endozanthoxylicus
  REGION 1..466: note = tr|A0A5J5GXC3|A0A5J5GXC3_9BACI Isochorismate synthase OS=Bacillus endozanthoxylicus OX=2036016; GN = F4V44_25275 PE=4 SV=1
MVTIQRTELKEGIQAAIEKAKKNSASVLVSEVQKIDSCLPLSFFAAGKEKYGGERFFWKHPSEERYMIGLGICKEIASDQATDRFFHVEKEWGSFISQAIIYDDEHVQGTGPTAFGGFSFDPHKEKTMLWSNYASSLFHIPRFMLSITDGHTYLTTNVVCTNECDSSYYMEIENERQELLAQTREHVKLELVSLVDRLEVKPEAWKQSVTQVVEGLKQGPLKKVVLARELRLIFNGEIQSETVLNRLLEEQKDSYVFAFESHGDCFIGASPERLVKKNHDQVFSTCLAGSIARGKSEAEDELLGNSLLKDDKNLIEHQYVVDMIKEAIEDTCTKVTIPSHPQLLKLKHIQHLYTPVIGKADEHTSLLALVEKLHPTPALGGLPKEPAVAKIREVEDLDRGFFAGPIGWMDYQGNGEFAVAIRSGLIQGNEASIFAGCGLVGDSRAESEYEETNMKFKPMLSALGGI

SEQ ID NO: 93361 - protein, 512 aa, unidentified
  source 1..512: note = Bacillus filamentosus
  REGION 1..512: note = tr|A0A3A5J0E1|A0A3A5J0E1_9BACI Isochorismate synthase MenF OS=Bacillus filamentosus OX=1402861 GN=menF; PE = 3 SV=1
MYFKIRFFSLLQLSIFKRRFYHIGFPEINWEIKIRLCQILLEGASVITSIEEAKRKIEDASLRANKLEKPQFVSIVKQIAQFDPLSVYYNGRHLYEGKRFFWKDAYDPFYLVGFDYAHIIEKNKGRDRFKYVEEEWKRFIKSVEDNKTPFGTGNLLFGGFSFHPYQKEDNLWTSFPVSRFFVPKVLFTSYNKEAFLTFNRYIKQGESVEDIIKEMEHIEETFLASDTLPSQVHNRDAVQHEVAPEEWKRAVKHATEQIRSGEIEKVVLARELQVTFHEKIWSEYALSSLLEEQNLSYIFAVEQDSQCFIGASPERLVKSVDGEVFSTCLAGSIPRGHSAEEDEKLGEELLNDEKNLFEHNLVVNMIEKAMKETCLNVYAPEHPTLYKVKHIQHLYTPIRGKAKEGTTLIELVEKLHPTPALGGYPKEESIEVLEKLEVFERGWYAAPIGWLDGDGNGEFIVGIRSALLRGHEASLFAGCGIVADSDPQSEYEETKTKFKPMLSALGGMNNDK

SEQ ID NO: 93362 - protein, 469 aa, Bacillus firmus
  REGION 1..469: note = tr|W7LF93|W7LF93_BACFI Isochorismate synthase MenF; OS = Bacillus firmus DS1 OX=1307436 GN=menF PE=3 SV=1
MVTIQDTELKEGIHEAIERAKALSKPVLVSEVKKINHIEPLSFYAAGKSRFFGERFFWKDPSGEAYIIGLGICRQIQSDESTGRFDHVEKEWKRFINNSIIFNPYNENATGPVMFGGFSFDPLKQKTKLWSKYSNSLFHVPAYMYSEINGQAFLTTNVVCTQHDSESLFEKIAAERSMLIGSINDYHPESANTLQEEADINPEKWMETVDEIVDELKTGSLLKKVVLARESRLIYEKPIEIERVLQNLMKMQSESFIFAFESNGDCFIGASPERLIKKYGESVFTTCLAGSIPRGKTEEDDHILGEALLHDQKNLTEHQYVVDMIKEAMEESCTEVELPNEPQLMKMRDIQHLYTPVIGKTREDASLLALVDRLHPTPALGGLPKREAVEKIREAEELDRGFYAAPLGWMDFRGNGEYAVAIRSGLIQGNEASLFAGCGVVQDSNAESEYQETKIKFRPMLTALGGYEK

SEQ ID NO: 93363 - protein, 473 aa, Bacillus flexus
  REGION 1..473: note = tr|A0A4P8X595|A0A4P8X595_9BACI Isochorismate synthase MenF OS=Bacillus flexus OX=86664 GN=menF PE=3 SV=1
MIAITEQLIHDHLSKAIECARNESNTKLVSVVKKVRPIDPLIFYANGYRQFCKERFFWRDPNQQYTFVGLGRAYTLSSKEGSARFFDTEKQWKRFKKDILYTNNVEFPNGTGPLLFGGFSFDPYQKKDSYWTDFSNSKFVIPSVLYTEADGNGYLSINIKVSGEDNIQDHLKHIEELEGLLINQEYDGSSYSSPLLLTKEEIDVQRFTKNVQNATSLIQQEKIEKVVLARQLKATFTEAISTEYVIQRLLREQPTSYTFIFENENQHFVGASPERLVQKEGDYVFSTCLAGSIKRGKTRKEDALLGDELLNDQKNLIEHDVVVHMIKEAMDAYCMEVEIPMQPTLYKTKHIQHLYTPVRGKIKKGVTLFSLLKELHPTPALGGYPQKESLSIIRKLEPFDRGWYAAPIGWIDINGNGEFIVGIRSGVIERQQAMLFAGCGIVADSTPESEYEETTIKFNPMLSALGGIASGPY

SEQ ID NO: 93364 - protein, 473 aa, Bacillus foraminis
  REGION 1..473: note = tr|A0A4R2BBN1|A0A4R2BBN1_9BACI Isochorismate synthase MenF OS=Bacillus foraminis OX=279826 GN=menF PE=3; SV = 1
MGGINLVTIQDTELRKGIIAAIDRAKELSQSVLVSEIQRIEYFKAFNFFAAGRSRFLGERFYWEDPDGTMALAGLGVTRQIHADSAPDRFNHTESEWKRFIETAIIVGDQTATGTGPAMFGGFSFDPLKEKTGLWSKFSDSLFHIPKYMLTVKGGQAFLTTNVVCTQHDDDSLFEKVNQERLSVFTSAYDDGRYRSAELKKVEEKNPEKWKETVSRLVASLKDSHLKKVVLAREIRLFFNQEIEIEKVLSHLVVEQRGSFLFAFEANGDCFIGASPERLVKKEGDEVFSTCLAGSIARGGTPEEDRMLGKALLEDQKNLNEHQYVVEMISEAMLETCEKVKIPNSPKLMKMKYIQHLYTPVVGKSRAETSLLHLVDRLHPTPALGGLPKQDAIEKIREIEDLDRGFYAAPIGWMDYKANGEFAVAIRSALVQGKEASLFAGCGVLADSNAESEFNETSIKFRPMLTALGGKEK

SEQ ID NO: 93365 - protein, 464 aa, Bacillus fortis
  REGION 1..464: note = tr|A0A443ILP7|A0A443ILP7_9BACI Isochorismate synthase OS=Bacillus fortis OX=254758 GN=D4N35_015040 PE=4; SV = 1
MLMNSPFQTKYINTLKHKTESNKVLASYTKKVDKIDPFAFYQINRPPDEGERFFWKSPDDDMTIVGVGLLRSFSNSGADDRFSRIETEWNDILSSAVIDNPFHVPGTGPLLFGGFSFDPYSLKEEKWQPFGDALFYLPEYMLTVIGDDYYLTVNLFESDELSNQTNKVEKTFDLLIKNEEPSQVPAPHLESREELYVPEWLDSVAEVVNVLRTSEIVKKVVLSREMMLNFSEPVSSEYVLKQLHTQQKDSFIFLLETPDGSFAGASPERLVKKMNDQVLSTSLAGSIGRSEDSKEDRELGNILLNDEKNLYEHHLVVDMIKKALEPYCRELQVPDDPVLLRTPYIQHLYTPVSGVAKSGTSIFHIVGELHPTPALGGVPTGQSMKIIRDKEKMDRGFYASPIGWTDFDGNGEFIVAIRSGLLKGKQAFLYAGCGLVADSDPKEELKETGIKFRPMLQAMGGKSE

SEQ ID NO: 93366 - protein, 464 aa, unidentified
  source 1..464: note = Bacillus freudenreichii
  REGION 1..464: note = tr|A0A448FF54|A0A448FF54_9BACI Menaquinone-specific isochorismate synthase OS=Bacillus freudenreichii; OX = 1783501 GN=menF PE=4 SV=1
MINSPYQTKQINTLKHKDAKSNKVLVSYTKKVKKVDPVAFYQINKPDYDGERFFWTSPDDHTAIVGVGHLHSFFNRRADDRFSQIEAEWNELLASSDINNPFQAPGTGPLLFGGFSFDPYSVKEEKWEPFGDALFYLPEYMLTISGEDCYLTVNLFENEEMAPYSNQMEKSFDLLINNVKRSEISLPNLVNKEELSVPEWLKSVSEVIDELKTSGTVDKVVLSRELKLSFSEPLLTDYVLEQLNTQQQDSFIFMLETSDGSFAGASPERLVKKMNDQVLSTSLAGSIGRSDNPKRDKELGNMLLNDEKNLFEHALVVEMIKKALQPYCEDLDIPNEPVLLKTPYIQHLYTPVCGVSKPGTSIFHLVGELHPTPALGGVPTDRAMKIIRDKEKMDRGFYASPIGWTDFQGNGEFIVAIRSGLLKGKQSYLYAGCGLVADSDPSDELKETSIKFQPMLQAIGGKSE

SEQ ID NO: 93367 - protein, 404 aa, unidentified
  source 1..404: note = Bacillus gaemokensis
  REGION 1..404: note = tr|A0A073K9N5|A0A073K9N5_9BACI Isochorismate synthase OS=Bacillus gaemokensis OX=574375 GN=BAGA_04510; PE = 4 SV=1
MNHTTALKELATKLLDDYKAGSSFFFASPYRTILAEGTFATVQHSQAENFPELVHAVLNNAKQAGRPNPIVVGALPFDRTKAVQLVVPQESRFADRLQLDSTDRVQQSPALTYEMKPVPAPSEYMRGVEQGVAKIKSGDLKKIVLSRSLDLKSPEKVDIQKLLRDLAEHNKHGYTFAVDLPKSQEENDDASKQRSRTLIGASPELLVSRSGMQVISNPLAGSRPRSEDPVEDKRRAEELLSSAKDLHEHAVVVEAVATALRPYCRTLHVPEKPSLINSEAMWHLSTEVKGELLDASVSSVELALALHPTPAVCGTPTEKAREAIKEIEPFDREFFTGMLGWSDLNGDGEWIVTIRCAEVEENSLRLFAGAGIVAESKPEDELAETSAKFRTMLRAMGLNDESLK

SEQ ID NO: 93368 - protein, 399 aa, Bacillus ginsengihumi
  REGION 1..399: note = tr|A0A0A6VCR2|A0A0A6VCR2_9BACI Isochorismate synthase OS=Bacillus ginsengihumi OX=363870 GN=NG54_09660; PE = 4 SV=1
MSNTTRNKTAKEIIHEYEIDSSFFLSTPQRTLLTKGIVTKYPDDDLNNGTGQMLEQIRKMLSNAKLQGMNDPIVVGAIPFDYTKSLQLFVPKEVEKLGPLSFVEEIRKEDLSKIKYEMTPVPERKEYGEYVAKALKKITNHELSKIVLARSLHVKADKKIAIHKLIQSLVAQNSNGYTFAVNLPQSGLRERKRTLLGASPELLVSKSGSYVCSNPLAGSAPRSKDPKEDQRRAEQLLHSSKDRYEHKFVVDAVAQTLKPFCTNLEVPTEPSLIQTETMWHLSTEIRGQLANPSTTALELGLALHPTPAVCGAPTNLAKEAIQEIEAFNRDYYSGMVGWSDADGNGEWIVTIRCAEVEDDLLKLYAGAGIVAGSKADSELAETSAKLRTMLLSMGISSEY

SEQ ID NO: 93369 - protein, 474 aa, unidentified
  source 1..474: note = Bacillus glycinifermentans
  REGION 1..474: note = tr|A0A0J6DZM6|A0A0J6DZM6_9BACI Isochorismate synthase MenF OS=Bacillus glycinifermentans OX=1664069; GN = menF PE=3 SV=1
MVTTVQRTSLREASEALNIVKKVNHAVLISYSRKIKNIDALSFFRSGEEAFAGKRFFWSDPDGEMTLIGFGKELPISTSGKDSGRYREIDQQWAHLKEKAYHFHEGEDLHQAAVGPLLFGGFSFDPLETREQHWDGYPEGAFFVPSAMLTKAGEEAFLTVNKWKSPNEDASNVLAELKAASLHLTNISAFKEDEKAGARIEAKEELHVSEWLDAIRRATSDIKKGAYDKVVLARDILLTFDKPVKLHEVLSRLMSEQKTSYIFAIEENGKSFVGASPERLIKKDGMKVLSTCLAGSIKRGETEQEDRMLGLELLNDEKNLIEHDIVVGMIHQAFLANCSHVKKPAKPGLYKTKNVQHLYTPVVGQMNDQASLFDLIEQLHPTPALGGSPQQKAVEVIRNIEPMSRGWYAAPVGWIDIGGNGEFAVAIRSGLIESNEARLFAGCGIVADSDPLLEYEETQIKLKPMLSAFGGDTL

SEQ ID NO: 93370 - protein, 469 aa, unidentified
  source 1..469: note = Bacillus gobiensis
  REGION 1..469: note = tr|A0A0M5JA77|A0A0M5JA77_9BACI Isochorismate synthase MenF OS=Bacillus gobiensis OX=1441095 GN=menF; PE = 3 SV=1
MVTVIQHTLLQEASLALNKAKKVNHAILLSYSKQIESIDPLAFFSNGEKQYAGQRFFWSDSNSDLKIIGLGKEVIFQAEDNAENRFRVIHEKWERFKNDSCHIHDGACSDIAAVGPLLFGGFSFDPKEEKAPHWNHFSAGKFFVPALMLTISSSGAFLTANRWTYGEEDAEQALRKLLKSVSSANEAACSTKQRTKLNSIEEKNTREWMNAVRSATEEIKKKNYDKIVLAREVLATYEENIKLDHVIATLLHEQKTSYVYVVEEGAQSFISASPERLIRKEGSNVSSSCIAGSIKRGKTDEEDEQLGRELLSDQKNRMEHQIVVNMINDAFLANCTAVKKPEKPGLYKTKNIQHLYTPITGTINEKASLFDLIHKLHPTPAVGGEPRELALEFIRNVEPMNRGWYAAPVGWIDCKDNGEFIVALRSGLIERNQARLFAGCGIVEDSDPEKEFEETQIKLRPMLSALGGM

SEQ ID NO: 93371 - protein, 471 aa, unidentified
  source 1..471: note = Bacillus halotolerans
  REGION 1..471: note = tr|A0A2S9WM45|A0A2S9WM45_9BACI Isochorismate synthase MenF OS=Bacillus halotolerans OX=260554 GN=menF; PE = 3 SV=1
MVTTVQRTFRKEVLHALHKAKEVNHAVLISYSRQIESLDPLSFFNYGAKKYTGNRFFWSEPESELTIVGLGKEAVFQTNQKNDERYREVFEQWERFKKTAFHIYEEEKLQHSAVGPVLFGGFSFDPYEERGTQWDHFSEGDFFVPSLMLTMSADGSFLTVNRWVSGEDDAEAVLEGLKAFASEFVVPDLNQKDQAVMTASQELDKSDWLKAIETATSQIKENQYDKVVLARELLLTFDGPVKMEPVLKTLLTDQQTSYVFAIEQEGKTFVGASPERLIKRDGNTVMSTCLAGSIKRGSDEEEDRRIGLELLNDEKNLLEHDIVVGMIHNAFVSSCSDVEKPDEPVLYKTKSVQHLFTPIVGQLHASASLFDLIEKLHPTPALGGAPQKKAVEVIREIEPMSRGWYAAPVGWIDSQDNGEFAVAIRSGLIEGSTARLFAGCGIVEDSEPQSEYEETQIKLKPMISALGGERR

SEQ ID NO: 93372 - protein, 474 aa, unidentified
  source 1..474: note = Bacillus haynesii
  REGION 1..474: note = tr|A0A1R1RPB8|A0A1R1RPB8_9BACI Isochorismate synthase MenF OS=Bacillus haynesii OX=1925021 GN=menF PE=3; SV = 1
MVTTVQRTFLREAPEALNIVKKVNHAVLISYSRKIESIDALSFFINGEEQFAGERFFWSDPDGGLTLVGLGKEVSVSTDLKDAGRYQAVHEKWERLKEKTYHFHEDQSRSQAAVGPLLFGGFSFDPLEDRKQHWNGYQEGAFFIPSAMLTQDGEETFITVNRWKAPEEDVRKVLEEIKGAASQLTKADASRYPEKGHTRYTAKEELDVPEWLEAVRRATDDIKNGKYDKVVLAREILLTFDQPVELHRVLFNLMSEQKTSYIFAIEENGKSFLGASPERLVKKDGENVLSTCLAGSIKRGESEQEDRMLGLELLNDEKNLIEHDIVVNMIHQALLSNCSNIKKPAKPGLYKTKNVQHLYTPIVGKMNAESSLFDLIEKLHPTPALGGAPQQKAIEVIRELEPLSRGWYAAPAGWVDMSGNGEFAVAIRSGLIDSKEARIFAGCGVVADSDPLMEYEETQIKMKPMLSALGGDIR

SEQ ID NO: 93373 - protein, 464 aa, Bacillus horikoshii
  REGION 1..464: note = tr|A0A1Y0CR79|A0A1Y0CR79_9BACI Isochorismate synthase MenF OS=Bacillus horikoshii OX=79883 GN=menF PE=3; SV = 1
MITIPFHHIVSLWEEAKVKAASINQSVLISYTKKIEQQDPLHFFQKSEQFFEGQRFFWSNPDHSHMMVGAGVTAEFTADGEDDRYHAIETQWKRFIRQAICNEDTHSIGPVMYGGFSFDPKKDKTKLWDQFADALFILPTFMLTKVEGNTYITINYLSDCDESVLKELVMQEEELLNRSSIKHVNTTSIVKCLEMDPMEWKESISKVTEKISDGQMDKVVLARELRVLFQDKVNVTPVLENLMEEQANSYLFTVERGTDCFLGATPEQLVKKQGNKVQSMCLAGSIARGESVEEDAQLGSALLTDEKNMHEHDLVVQMIRASLEKVCENVRTPSEPNLYKMKHIQHLHTPVTAESNDGCSLSGLIKLLHPTPALGGFPQEISLQTIREVERLDRGWYAGPLGWMDWKEDGEFVVAIRSGLLQEREASLFAGCGIVGDSDPESEYQETQIKFRPMLSALGGNLTQ

SEQ ID NO: 93374 - protein, 399 aa, Bacillus horneckiae
  REGION 1..399: note = tr|A0A2N0ZC69|A0A2N0ZC69_9BACI Isochorismate synthase OS=Bacillus horneckiae OX=549687 GN=CWS20_20800; PE = 4 SV=1
MAVSIKNKEYQLLDKFNAGDNLLYFPSKCILGKGEAVSLSAEEQSGLSFSERIHTLFRKAEVLGKDEPIIIGALPFNKGNRGMLIVPESVEQQVDMDSKQAGYTASSLSIKNIQSIPFAADYEKAVEKIVSSIQNGELEKAVLGRILQVAAKEELNIPQLIKQLIAENENKFNFALNISDGTERKKTLIGASPELLISKYGKTVVTNPLAGSRPRKADPLEDRQMENELRHSKKDLHEHQFVVHSIEEALRPFCKSLYVPKKPSVISTNTMWHLSTKIVGELKDSSTQSIQLAECLHPTPAICGTPADTAYKKIEMLEPFERDYFTGLIGWSNRNGDGEWAITIRCAEIENNLISLFAGAGIVEDSVPQEETAETAAKFRTMLSALGIKNIEEEGHKQC

SEQ ID NO: 93375 - protein, 476 aa, Bacillus hwajinpoensis
  REGION 1..476: note = tr|A0A4V5Q2T5|A0A4V5Q2T5_9BACI Isochorismate synthase MenF OS=Bacillus hwajinpoensis OX=208199 GN=menF; PE = 3 SV=1
MEESWGEKTVSTLQHQELYSLLHQGIRKAEKRGTSVLVSQVLSVAAVDPLSFYAAGPNKYENDRTFWSDPENDTTIVGLGSVKQFQAYRDRFRTIENEWQSFLQHSVVEGAPSRPGVGPVLLGGFAFDPTAPESGDWERFPEGGMVLPELMLTSAGSQGWLTINAIVCGDDDSDAMAEELLEKHHGILAHSSTDISPKIDAISIEEIRPEDWKETVRSAAANIRKGKLEKVVLAREIKLQSSNSFSSSRTLMNLKNQQSDSYLFAFEYGKKCFLGASPERLVKREGQQVYSTCLAGSIQRGETPEKDYELGHILLNDHKNRIEHDLVVQMIRKAMEEECDFVQVPSKPELLKTPHIQHLFTPVVARAGEGTSLLRMVERLHPTPALGGYPQEEAVEEIKRIENLDRGWYAGPVGWIDYQGNGEFAVAIRSGLLDGDQATLYAGCGIVADSDPESEYEETKMKFKPMLTALGGNQYD

SEQ ID NO: 93376 - protein, 473 aa, Bacillus indicus
  REGION 1..473: note = tr|A0A084GR08|A0A084GR08_BACID Isochorismate synthase MenF OS=Bacillus indicus OX=246786 GN=menF PE=3; SV = 1
MITALEHTFTEKLKGALDEAGQLEEPVILSQVKTLHEIKNPLQFYAAGEQHFSGSRFYWATPGARFTICGLGSECTVENDAVSDRFGRIETEWKRFKNIVHHEDSESFHIGTGALLFGGFSFDPHNRSNEQWSHFPESKFFLPSVMLTVKENASYLTINRIIRPDDELEDCALHFTDLANKVLAAQQPVSMEPAGNYSLEEEDTQEWMSAVEKATASIKGGKLDKVVLAREVSVSYERDINVYAALNKLQIEQPGSFIFSIEIGSKSFIGATPERLIKKEGSRLLSTCLAGSIKRGDTKHEDTELGTALLNDEKNLIEHDIVVKMIKDSFEECCSEIRVPDGPQLLKTKNIQHLYTPIEGTMHGGRSLLSLVEKLHPTPALGGYPKAGALEMIRDIEPMDRGWYAGPVGWLDSDNNGEFAVAIRSGLIDGEQASLFAGCGIVAESDPQSEYQETLIKLKPMLSALGGMQHEQI

SEQ ID NO: 93377 - protein, 468 aa, Bacillus infantis
  REGION 1..468: note = tr|U5LH05|U5LH05_9BACI Isochorismate synthase MenF; OS = Bacillus infantis NRRL B-14911 OX=1367477 GN=menF PE=3; SV = 1
MVTIQDTELKEGILEAIKRAGAFSEPILVSEVHKLDHIDPLSFFASGRQAFFGERFYWKDPSNETILAGLGICKLIQSDMASGRFSHVEKEWKRFIRNAVIYNEYSAAAAGPALFGGFSFDPEKEKTALWSKYPDSLFHVPRYLLTQTGGQTFLTTNVVCTKHDDVSLAEKIREERRLLLEGIGASVQEEESRLISEEEIHPQEWMDSVTSAVENLKAGKLKKVVLARELRLSFSGKIKAEQVLGKLHNEQNESFIFAFESQGDCFIGASPERLVKKKGKSLYSTCLAGSIPRGKTPADDQALGEALLSDEKNLIEHQYVVEMIKTAMDEACEEIIIPSKPRLMKMKHIQHLYTPVEGMTKEEASLLLLVDKLHPTPALGGLPKQEAVDMIREIEELDRGYYAGPLGWLDYSGNGEFAVSIRSGLLQGNEASLFAGCGIVESSNAESEFMETKIKFRPMRSALGGLTE

SEQ ID NO: 93378 - protein, 471 aa, unidentified
  source 1..471: note = Bacillus intestinalis
  REGION 1..471: note = tr|A0A136G802|A0A136G802_9BACI Isochorismate synthase MenF OS=Bacillus intestinalis OX=1963032 GN=menF; PE = 3 SV=1
MVTTVQRTFRKEVLHALHKAKEVNHAVLISYSRQIESLDPLSFFNYGAKKYTGNRFFWSDPESELTIVGLGKEAVFQTNQKNSERYREVFEQWERFKKTAFHIYEEEKLQHSAVGPVLFGGFSFDPCEERGTQWDHFSEGDFFVPALMLTMTAEGPFLTVNRWVSGEEDAETVLEGLKSFAAEFKVPDLNQVDQAVIAASQELDKDDWLKAIETATSQIKEKQYDKVVLARELLLTFEGPVQIEPVLKTLLNDQQTSYVFAIEQEGKTFVGASPERLIKRDGSTVMSSCLAGSIKRGANEEEDRRIGLELLNDEKNLLEHDIVVGMIHNAFASSCSEVEKPDGPVLYKTKSVQHLFTPIVGQLRESASLFDLIEKLHPTPALGGAPQKKAVEVIREIEPMSRGWYAAPIGWIDSQDNGEFAVAIRSGLIEGSTARLFAGCGIVEDSDPQSEYEETQIKLKPMISALGGERR

SEQ ID NO: 93379 - protein, 468 aa, Bacillus kochii
  REGION 1..468: note = tr|A0A248TK89|A0A248TK89_9BACI Isochorismate synthase MenF OS=Bacillus kochii OX=859143 GN=menF PE=3; SV = 1
MFTLQHTEFKEGFIKALSKAQRTNHDILFSEVCEIDCIDPLAFFGAGKKTELGDRFFWTGSDNEVVITGVGINYLFQSDQTTDRFFYVQKKWQSLLDDAIIHNSYSIDAIGPTLFGGFTFDPLKEKTKLWSQYKHTDFHLPQYMCTITGGRAFLTTNMLVHPHDREERIEYMLEERRQLLQNAKVLPTGINNKVIAQHEVASREWKKAVAQVVDEMKKNVIQKVVLARETRLTFAHPVQIESVLQNLLDKQKNSFIFAFESGSDCFIGATPERLVKKQGHTLYTTCLAGSMKRGETKEEDDVLGKELLQDEKNLQEHQYVVDMIRQAMEMVGTEVELPEGPQLLKLRDIQHLYTPVIAAASKEGSLLAIIEKLHPTPALGGVPTEKAIEVIRGLEILDRGLYGSPIGWLDYQGNGDFAVALRSGLIQGNEASIFAGCGVVKDSEVESEFQETKIKFRPMLSALGGELK

SEQ ID NO: 93380 - protein, 471 aa, Bacillus koreensis
  REGION 1..471: note = tr|A0A0M0L7V2|A0A0M0L7V2_9BACI Isochorismate synthase MenF OS=Bacillus koreensis OX=284581 GN=menF PE=3; SV = 1
MIAMTESFIQKTLQDASDFAKETGMPKLVSIVKDVHKMSPQTFLMNGKRVYNGDRFLWSNPDRSYTFAGVGVSHIFTTDNADGRFQDIEREWKRFNEQTVVHSISYPYGTGPLIVGGFSFDPNKQSTNLWNKFPSAKFVIPAFLYTVVNDQAYFTANVMVHPHKEVHDYIKEVEEAEKMLLNFTTIPEKSSSIMVNRHEIEPDKWKKTIQKATSAIKRDEFEKVVLARELRVTFDQELQLEQITDRLMAEQPTSYVFAIEQGENCFLGASPERLVKKVKDKVYSTCLAGSIRRGKDEEEDGVLGKELLTDEKNLIEHDVVVHMIKEAMNEYCEWIESPSHPALYKTKHIQHLYTPVEGEMKKDHTLLSLVEHLHPTPALGGYPKRTSVEFIRDVERLDRGWYAAPIGWMDVEGNGEFIVGIRSGLVKKNEASLFAGCGIVADSDPESEYEETNIKFNPMLSALGGATHDTH

SEQ ID NO: 93381 - protein, 463 aa, unidentified
  source 1..463: note = Bacillus kyonggiensis
  REGION 1..463: note = tr|A0A4U1D298|A0A4U1D298_9BACI Isochorismate synthase MenF OS=Bacillus kyonggiensis OX=1037680 GN=menF; PE = 3 SV=1
METELKKGIEEAIAKSKKSLIPILVSEVQKIDHIEPLSFFTVGKENYLGERFFWKDPTDSIYLIGLGVCHQIQSVDNRFNQVEDQWNQLLKEAIIVKDEEQKATGPFMFGGFSFDPLKKKTSLWSKYADSLFHVPKYLLSIVEGKTYLTTNIVCTQYDDSSIFEQTIVERQALVSKASKEYKSHFSMLVEEREVVDPEEWKQTVRDLVRDLKNGELKKVVLARELRLVFQDAVLVEGVLEQLLQEQKESFTFAFESNGDCFIGASPERLVKKEGNQLFSTCLAGSIARGKTEKEDKQLGDQLLNDAKNLREHLYVVEMIKEAMEKVCNEVKLPSRPSLMKMRDIQHLYTPVVGFSKEECSVLQVVDSLHPTPALGGLPQRQAVEKIRKIENLDRGFYAAPIGWLDYEGNGEFAVAIRSALIQGNEASLFAGCGIVQDSDAESEYVETKIKFRPMLSALGGLKK

SEQ ID NO: 93382 - protein, 462 aa, Bacillus lentus
  REGION 1..462: note = tr|A0A2X4WB48|A0A2X4WB48_BACLE Isochorismate synthase MenF OS=Bacillus lentus OX=1467 GN=menF PE=3 SV=1
MLTKTLMKSRFDRASKQVKHNDQAKLYSFTIKIDPCDPILFYKNNQHLYEGKSFFWKSPDEDFSLVGLGAAYIIKRNSSTSDRFKYIEKKWNKLCEQATIENPYEVPGTGPLLFGGFSFDANSMKEEEWNSFDQSLFYLPEFLLTVVDSVYYVTVNHFSEKYATIEEAKVLIDQLISNAVMYQQSEPVPIIKQEEIEPNDWVEKVEEIVQDLKQTSLQKVVMARKMKLKFAEPANIPHVIQQLVLQQPNSFIFALNVEKSCFLGASPERLVKKTGSEVLSTSLAGSIERGSDLKEDKELEKQLLHDQKNLFEHQLVVSMIKDALGPHCDKMNIPTQPMIMKTPDIQHLYTPVVGQMKPENSILQVLEGLHPTPALGGVPTKDALEIIRKKEEMDRGFYAAPVGWMDYRGNGEFIVAIRSGLIKEDEAYLYAGCGLVSESKPEDELIETRIKFRPMLRATGGN

SEQ ID NO: 93383 - protein, 474 aa, Bacillus licheniformis
  REGION 1..474: note = tr|Q65FT1|Q65FT1_BACLD Isochorismate synthase MenF; OS = Bacillus licheniformis (strain ATCC 14580 / DSM 13 / JCM 2505 / NBRC 12200 / NCIMB 9375 / NRRL NRS-1264 / Gibso n 46) OX=279010 GN=menF PE=3 SV=1
MVTTVQRTFLKEAPEALNIVKKVNHAVLISYSRKIESIDALSFFINGKEQFAGERFFWSDPDGGLTLVGLGKEISVSTDLKDAGRYQAVHEKWERLKEKTYHFHEDQSRGQAAVGPLLFGGFSFDPLEDRKQHWNGYQEGAFFIPAAMLTQDGEETFITVNRWKTPEEDVRKVLEEIKGAASQLTKADDSRYPEKGHTQYTAKEELDVPEWLEAVRRATDDIKNGKYDKVVLAREILLTFDQPVELHRVLFNLMSEQKTSYIFAIEENGKSFVGASPERLVKKDGENVLSTCLAGSIKRGESEQEDRMLGLELLNDEKNLIEHDIVVNMIHQALLSNCSNIKKPAKPGLYKTKNVQHLYTPIVGKMNAESSIFDLIEKLHPTPALGGAPQQKAIEVIRELEPMSRGWYAAPAGWIDMSGNGEFAVAIRSGLIDSNAARIFAGCGVVADSDPLMEYEETQIKMKPMLSALGGDIR

SEQ ID NO: 93384 - protein, 472 aa, Bacillus litoralis
  REGION 1..472: note = tr|A0A5C6VE36|A0A5C6VE36_9BACI Isochorismate synthase MenF OS=Bacillus litoralis OX=152268 GN=menF PE=3; SV = 1
MSLITTLDHTIKELIQQTLEEAKQTNQSVIVSHIKEVDAIDPLHFLASSEELFLGERFLWSTPERDFTLAGVGNELILENNHSTIERFSAIEKEWKRFKKRIINTNSKDKQDGTGPLLFGGFSFDPIKEKDPLWEAFSEAKFTLPTVMVTIINSKTYLTVNKLVTPHDNLLDCLKHFEQTYSQTTHHHLIDCEKVNEFSTIEYKTSQWLKAVDKATNEIRLKEMDKVVLAREVHLKFAEKVNPYQVLNRLHKEQPTSFIFGFENGLQHFVGATPERLIKKQDNEVLSTCLAGSIKRGKTQEQDIQLGEQLLKDAKNLIEHDIVVKMIKEALTNCCYEVISPKSPTLLKTKNIQHLYTPVKGYVQKGHSLLSIVENLHPTPALGGFPKEKAIEKIRELEPMHRGWYAAPIGWLDAEDNGEFVVAIRSGLIEGHNVALFAGCGIVAESNPKSEYLETKIKLKPMMSALGGVDNE

SEQ ID NO: 93385 - protein, 469 aa, unidentified
  source 1..469: note = Bacillus loiseleuriae
  REGION 1..469: note = tr|A0A0K9GYE7|A0A0K9GYE7_9BACI Isochorismate synthase MenF OS=Bacillus loiseleuriae OX=1679170 GN=menF; PE = 3 SV=1
MAISHETEWFYGLQQAVQKAKQQKQKVLFSVVREIDDLDPLSFYHAGRERYAGERFYWQDPEKELTIAGLGIVEKIQVKADAKRVRNIEANWTELQKNAVKVGVSGVVGTGPLVFGGYSFDYNKTDSLLWDQFGDSLFYIPAFMLSIVKGQAYLTTNIVCTSEDEANLFIDLINERENDIRNRLTNVAVSVNEYVEQIEDNPEGWKKIVAEAVLHMKHSELDKVVLARELRIVFKERIETVAVLRRLQKEQAGSFIFCLESAGDCFIGATPERLVKKHGNELFSACLAGSIARGKDAKKDRKLEHELLHDQKNLLEHQYVVSMIKDALSLVCKKLDVPKDPTVMKNRHIQHLYTPVSGECDANVSIFDVIGKLHPTPAMGGLPTEQAVAWIRENEELERGFYASPIGWSDSYGNGEFAVGIRSALIQGNEASLFAGCGVLEDSTPESEYEETGIKFNPMLSALGGNLHE

SEQ ID NO: 93386 - protein, 469 aa, Bacillus marisflavi
  REGION 1..469: note = tr|A0A163MYB8|A0A163MYB8_9BACI Isochorismate synthase MenF OS=Bacillus marisflavi OX=189381 GN=menF; PE = 3 SV=1
MVTIQKTNIDQAYDAALLKAQQINLPVLFSMVEETGAMDPLSFYHAGGRVFKGERFLWKDRDQTISLIGAGSSYDMSSSLKEGERFFAIEKEWKRFISDAVVVSREEWSGTGPLAFGGFRFDSANPASAEWTGFDEGTLRIPRYMLTKAGEANYLTVNIVCRPDGSGPSLQHCLKEKDLLLTMASEPASQMDPGDMSAEDIRAHEWKQSVRNVVDRLKNGEMEKVVLARKTKVSFSDEVTSDYVLDNLWKQQPDSFIFSFEQEGSCFIGATPERLVKKDGEEILSTCLAGSIARGSDLEEDERLGRELLEDDKNRYEHQLVVDTIRQALSSDCERLSIPDEPQLMKLKDIQHLYTPVKGTAPSGLSILTLVEKLHPTPALGGVPRKEAMQVIREEEQMDRGLYAGPIGWMDAYGNGEYAVALRSGLLKGDHAFIYAGCGIVAHSDPDSEFKETQMKFRPMQRALGGNLI

SEQ ID NO: 93387 - protein, 473 aa, Bacillus megaterium
  REGION 1..473: note = tr|D5DUK5|D5DUK5_BACMQ Isochorismate synthase MenF; OS = Bacillus megaterium (strain ATCC 12872 / QMB1551); OX = 545693 GN=menF PE=3 SV=1
MIATTEQLVQEYIKDAIECAKNENQPKLVSLVKKVRPIDPLIFYANGHDQFYKERFFWKDPNSYYTFVGLGYAHTICTNAAKERYFHIENEWKRFIKEDFYKNNQIFPDGTGPLLFGGFSFDPNQYRENYWSDFPSSKFMIPTVLYTQVDKEGYLTVNMMVKGQDSVKKHINYFEEVQKLVLCEEYDGESHISPLLLEKEEIGVEKFKGNVERATTLIKQQAIEKVVLARQLKVKFNEDISTEYVLQRLLKEQPTSYTYILEGEHQHFIGASPERLVQKQGDYVFSTCLAGSIPRGKTRQEDHELGEELLQDPKNLIEHDVVVHMIKEAMNSYCYEVEIPSTPSLYKTKHIQHLYTPVKGRIKEDVTLFSFIQKLHPTPALGGYPQQEALPIIRQLESFDRGWYAAPLGWMDINGNGEFIVGIRSAVIHQKEAVLFAGCGIVADSTPESEYEETRIKFNPMLSALGGIMRGTH

SEQ ID NO: 93388 - protein, 466 aa, unidentified
  source 1..466: note = Bacillus mesonae
  REGION 1..466: note = tr|A0A3Q9QWZ2|A0A3Q9QWZ2_9BACI Isochorismate synthase MenF OS=Bacillus mesonae OX=1193713 GN=menF PE=3; SV = 1
MLTIQGTEIKDRGITAVKKAQQLGRPVLLSEVYKLDSINPLSFFKIGSERFLGERFFWKDPKGENILIGLGISKQIQSDQATDRFFRVGKEWGDLLEDSLIFNEYVEMGVGPVLFGGFSFDPNKEKTELWSKYPDSLFYLPKYLLSIINEEAYLTTSIVCMPQDDHTLFERILDERNELLHSLYQNSQNEQAVLLETKEIAPEQWKQSVNDVVKELTGGPLKKVVLARELRLIFDKQIEAETVLENLYRQQHESFIFAFESNGDCFLGASPERLVKKQENEILSTCLAGSISRGKTVEEDVRLGETLLHDQKNLIEHQYVVEMIKEALEESCEKVIIPDHPQLMKVRDIQHLYTPVIGEARNDTSLLLLVEKLHPTPALGGLPKREAVEKIRQVEVLDRGFYAAPLGWLDYRGNGEFAVALRSGLIQGNEASLFAGCGVVADSKSESEYLETGLKFRPMLRALRGE

SEQ ID NO: 93389 - protein, 464 aa, unidentified
  source 1..464: note = Bacillus mobilis
  REGION 1..464: note = tr|A0A386V7J7|A0A386V7J7_9BACI Isochorismate synthase OS=Bacillus mobilis OX=2026190 GN=MLA2C4_25275; PE = 4 SV=1
MIQTKQIGLQEVLAAAIKRATDEKILVSFVKQIDWMDPLLFYAAGKRIAFENRCYFADPAQHVIFAGIGSVFTIATASQKRFQTTREEWDKVKEKAFVQREKYEFGTGPLLFGGFSFDQEKEKTDLWKEFDDTTFSLPAFLLTVKNEKAWLTMNTFVSATDCAETLYNEIVSLEEKIFGESKCALEGLKLTVTSKVEVDPKGWMKAIEKVQDEMKQGNVQKVVLARELKIEMDHHIDSALVLEALRIGQPDCYVFSFDYKGACFLGATPERLIRKEDEKFTSMCLAGSTGHGQSIEESKRNSNALLHDEKNLAEHGYVVNMIRSVLNEHCQSVNIPESPGLLTTKNLIHLYTPVEAKGDASLLTMVEELHPTPALGGTPRLEAMKLIRDVELLDRGLYGAPIGWIDDEGNGEFAVALRCGLLNGEKASLFAGCGIVIDSVPQLEYEETSLKFRPMLGALEELMK

SEQ ID NO: 93390 - protein, 469 aa, Bacillus muralis
  REGION 1..469: note = tr|A0A1B3XUE4|A0A1B3XUE4_9BACI Isochorismate synthase MenF OS=Bacillus muralis OX=264697 GN=menF PE=3; SV = 1
MAISEETEQFQGLASAIQKAKDLNDQVLFSHIKKIQCTNPLSFYQAGRERYAGERFFWEDPAKEITITGLGNVKKLKAAANAERYREVEKSWIKLQETAVKTGVTDVEATGPLLFGGFSFDYESNSTILWNHFGDNLFYIPAFMLSIVGKQAYLTTNLLCSPDDSEKLFRDMINEREAFLSEGLDGVPCGPNSLVKQREVQSAEWKRTVTEAVEEIKTTDLDKIVLARELRLTFEHSIDSGKVLEQLIAEQPLSYIFSLEAGGDCFVGATPERLIKKQGDAVFSTCLAGSMGRGKDQREDVSLGNELLHDQKNLQEHQYVVSMISNAFDAVCEKVVIPDGPELMKNRHIQHLYTPVRGVAKEGVTILQFVENLHPTPAMGGLPKGKAVVRIREMEGLERGFYAGPLGWMDTYGNGEFAVGIRSALIQDNEASLFAGCGVVEDSTASAEFRETGIKFNPMLSALGGNLNE

SEQ ID NO: 93391 - protein, 398 aa, Bacillus mycoides
  REGION 1..398: note = tr|A0A090YU05|A0A090YU05_BACMY Isochorismate synthase dhbC OS=Bacillus mycoides OX=1405 GN=dhbC PE=4; SV = 1
MTKQIVAVRESGLKLLEDYKTESPFFFASPYRTILAEGTFATVKHKEVKSFPELVQAVLSNAKKAGHPNPIVVGALPFDHRKAVELVVPEESRITSRLELDSTNQIQQPSKLTYEMKPVPEPSGYMDGVKQGISKIKEGDLKKIVLSRSLDLKSSEKIDIQKLLFDLAQHNKHGYTFAVNLSQDEKEKNKTLIGASPELLVSRNGMQVISNPLAGSRPRSEDPVEDKRRAEELLSSPKDLHEHAVVVEAVAAALRPYCHTLHVPEKPSVIHSETMWHLSTEVKGELIDSSVSSLELAIALHPTPAVCGTPTEKAREAIQEIEPFDRNFFTGMLGWSDLNGDGEWIVTIRCAEVQENSLRLFAGAGIVGESKPEEELAETSAKFRTMLRAMGLNDETLK

SEQ ID NO: 93392 - protein, 471 aa, unidentified
  source 1..471: note = Bacillus nakamurai
  REGION 1..471: note = tr|A0A150FBT2|A0A150FBT2_9BACI Isochorismate synthase MenF OS=Bacillus nakamurai OX=1793963 GN=menF; PE = 3 SV=1
MVTTVQHTFRKEAVHALHKAKQVNHAVLLSYSRRIASLDPLSFFNYGAKKYKGKRFFWSEPGSELTIVGLGTEAVFQSKEKNEQRYHDVFEQWERFKKTAFHIHEEEQAQHSAIGPVLFGGFSFNPSEERGDEWNGFEEGLFFIPSLMLTKTADGDYVTVNQWVGEADQAEDVLERLKSFSEAFTVSSLTYEDYPALTKAEELDVENWLEAIKTATNEMKENQYDKVVLAREVLLSYDGPIPIESVLNKLLTDQTTSYIFASEQGNKCFIGASPERLIKKAGKNVMSSCLAGSIKRGENEQEDERLGWELLHDEKNLMEHDFVVKMIHGAFLSSCHDVEKPAGPQLYKTKNVQHLYTPIVGRLKTSASLFDLIEKLHPTPALGGAPQKKAVEVIAELEPMTRGWYAAPIGWIDSRENGEFAVAIRSGLIEGNEARLFAGCGIVEDSDPQSEYEETQIKLKPMISALGGERL

SEQ ID NO: 93393 - protein, 469 aa, unidentified
  source 1..469: note = Bacillus notoginsengisoli
  REGION 1..469: note = tr|A0A417YDQ0|A0A417YDQ0_9BACI Isochorismate synthase MenF OS=Bacillus notoginsengisoli OX=1578198; GN = menF PE=3 SV=1
MVTIHETELKEKILLGITKAGELNRPILVSEVNKVEPTEPLAFFNNGNEAFFGERFYWKNPEGSLNIAGVGIAAQLSSEQAEGRFSKIDRKWKQLIQDSIVSTPHHAPGIGPLMFGGFSFDPLKEKTALWSKYPEALFHVPRFMLTMVDGDVYVTTNVLCTKHDDVSLFYKVVAERDSLLKEDEHLAVGKTAPLKGMTEIKPAEWKKSVTEAIRQLNMEGLLKKVVLARELRLFFDKKVETGTLLQNLESEQKTSFIFSFESGGDSFIGASPERLVQKHGKSVQSACLAGSFPRGKTDTEDRQLSSQLLNDEKNLAEHQYVVDMIRNALEGACEQVKIPDKPSLMKIRDIQHLFTPVEGVALDTTSLLDLVERLHPTPALGGLPKQLAVETIRELEELDRGFYAAPIGWMDYAGNGEFAVAIRSGLIQGQEASLFAGCGVVANSDVESEYVETRLKFRPMLSALGGTIE

SEQ ID NO: 93394 - protein, 468 aa, Bacillus oceanisediminis
  REGION 1..468: note = tr|A0A160MGR6|A0A160MGR6_9BACI Isochorismate synthase MenF OS=Bacillus oceanisediminis 2691 OX=1196031; GN = menF PE=3 SV=1
MVTIQDTELKEGIQEAIERAKSLSKPVLVSEVQKINHIDPLSFYAAGKSRFFGERFFWKDPSGETYIIGLGICKQIQSDQSTGRFNHVEKEWKRFINNSIIFNPYDKNATGPVMFGGFSFDPLKRKTKLWSKYSDSLFHVPTYMYSEMNGQAFLTTNVVCTQHDGDSLFEKIVAERGMIMASISDYHPENANTLQEEADINPEKWMETVDAVVDELKSGSLKKVVLARESRLIYDKPIEIERVLWNLMEMQRESFIFAFESNGDCFIGASPERLIKKYGENVFTTCLAGSIPRGKTAEDDHILGDALLHDQKNLTEHQYVVDMIKEAMEESCSEVELPDEPQLMKMRDIQHLYTPVIGKTKGDASLLALVDRLHPTPALGGLPKREAVEKIREVEELDRGFYAAPLGWMDFRGNGEYAVTIRSGLIQGNEASLFAGCGVVQDSNAESEYQETKIKFRPMLTALGGYEK

SEQ ID NO: 93395 - protein, 469 aa, unidentified
  source 1..469: note = Bacillus oleivorans
  REGION 1..469: note = tr|A0A285CW03|A0A285CW03_9BACI Isochorismate synthase MenF OS=Bacillus oleivorans OX=1448271 GN=menF; PE = 3 SV=1
MAVAQPVLFAAKALEAIHMAKQKNEPFFVSEILKIDAINPFLFYHAGQALYQNERFFWKNADDTLQLVGLGSAFSILSNEDHGRFAHVEEEWTKFKGRVVSDNKGKIEGAGPVLLGGFSFDPKKREAGIWSSFPNAQFFVPKFLLTIHNHKDVYLSVTFACKPYDEESIVKGVNQELEMLLSDARKSFENTRPLLVSKEEIAPDQWKASVSSAIDALKNKELEKVVLARKIKLTFEQELDVTSILQTLDQEQKDSFVFSFDWQGASFLGATPERLVRKKGDLAQSTCLAGSIGVGQSDDETAELGKWLLKDEKNTVEHNYVVQQITKTFENLCLEVQVDEKPKVLKMRDIQHLYTGIRGKVLHHVSLLDFVESLHPTPALGGTPRNKALQVIRDLEQMDRGFYAAPIGWCDFEDNGEFVVGLRSGLIQDHKATLFAGCGVVENSVPEKEYEETRIKFRPMLSALGGMEN

SEQ ID NO: 93396 - protein, 464 aa, unidentified
  source 1..464: note = Bacillus pacificus
  REGION 1..464: note = tr|A0A5C4ZHN4|A0A5C4ZHN4_9BACI Isochorismate synthase OS=Bacillus pacificus OX=2026187 GN=FHY68_24745; PE = 4 SV=1
MIQTKQKGLQEVLSAAIKHATDKKILVSFVKQIDWMDPLLFYAAGKRIAFENRCYFADPAQHVIFAGIGSVFTIATASHKRFQTARDEWDKVKEESFVQRERYEFGTGPLLFGGFSFDQEKEKTDLWKEFDDTTFSLPAFLLTVKNEKAWLTMNTFVSETDCAETLYNEIVSLEEKILEESKCALGGSKLTVTSKVEVDPKGWMKAIEKVQDEMKQGNVQKVVLARELKVEMDHHIDSALVLEALRIGQPDCYVFSFDYKGACFLGATPERLIRKEDEKFTSMCLAGSTGHGQSIEESKRNSDALLHDEKNLAEHGYVVNMIRSVLNEHCEFVNIPESPGLLTTKNLIHLYTPVEAKGDASLLTMVEELHPTPALGGTPRLEAMKLIRDVELLDRGLYGAPIGWIDDEGNGEFAVALRCGLLNGEKASLFAGCGIVIDSVPQLEYEETSLKFRPMLGALEELMK

SEQ ID NO: 93397 - protein, 474 aa, unidentified
  source 1..474: note = Bacillus paralicheniformis
  REGION 1..474: note = tr|A0A1Q8H0E3|A0A1Q8H0E3_9BACI Isochorismate synthase MenF OS=Bacillus paralicheniformis OX=1648923; GN = menF PE=3 SV=1
MVTTVQRTFLREAPEALNIVKKVNHAVLISYSRKIESIDALSFFINGEEQFAGKRFFWSDPDGGLTLVGLGKEISVSTDLKDAGRYQAVHEKWERLKEKTFHFHEDQCTSQAAVGPLLFGGFSFDPLEDRKQHWNGYQEGAFFIPTAMLTQDGEETFITVNRWKAPEEDVRKVLEEIKGAASQLIKADASRYPENGHARFTAKEELDVPEWLEAVRRATDDIKNGKYDKVVLAREILLTFDQPVELHRVLFNLMSEQKTSYIFAIEENGKSFVGASPERLVKKDGDNVLSTCLAGSIKRGESEQEDRMLGLELLNDEKNLIEHDIVVNMIHHALLSNCSNIKKPAKPGLYKTKNVQHLYTPIVGKMNAESSLFDLIEKLHPTPALGGAPQQKAIEVIRVLEPMSRGWYAAPAGWIDMSGNGEFAVAIRSGLIDSKEARIFAGCGVVADSDPHMEYEETQIKMKPMLSALGGDIR

SEQ ID NO: 93398 - protein, 464 aa, unidentified
  source 1..464: note = Bacillus paranthracis
  REGION 1..464: note = tr|A0A4U1DHH5|A0A4U1DHH5_9BACI Isochorismate synthase OS=Bacillus paranthracis OX=2026186; GN = CQB03_12515 PE=4 SV=1
MIQTKQIGLQEVFSAAIKRATDEKILVSFVKQIDWMDPLLFYAAGKRIAFENRCYFADPAQHVIFAGIGSVFTIATASHKRFQTARDEWDKVKEKAFVQREKYEFGTGPLLFGGFSFDQEKEKTDLWKEFDDTTFSLPAFLLTVKNEKAWLTMNTFVSATDCAETLYNEIVSLEEKIFEESKCALEGSKLTVTSKVEVDPKGWMKSIEKVQDEMKQGNVQKVVLARELKVETDHHIDSALVLEALRIGQPDCYVFSFDYKGACFLGATPERLIRKEDEKFTSMCLAGSTGHGQSIEESKRNSDALLHDEKNLAEHGYVVNMIRSVLNEHCESVNIPESPGLLTTKNLIHLYTPVEAKGDASLLTMVEELHPTPALGGTPRLEAMKLIRDVELLDRGLYGAPIGWIDDEGNGEFAVALRCGLLNGEKASLFAGCGIVIDSVPQLEYEETSLKFRPMLGALEELMK

SEQ ID NO: 93399 - protein, 468 aa, unidentified
  source 1..468: note = Bacillus praedii
  REGION 1..468: note = tr|A0A4V2NUH6|A0A4V2NUH6_9BACI Isochorismate synthase MenF OS=Bacillus praedii OX=1742358 GN=menF PE=3; SV = 1
MVTIQETELKEGILKAIERAKALSKPVLVSEVQEINHIEPLTFFAAGHEPFLGERFFWKDPADETFILGLGICKQIQSDQAADRFFLVEEEWKNFIKDGIINNPFHLNGIGPLMFGGFSFDPYKEKTKLWSKYSDSLFHIPKFMYSEINGRSFFTTNIVCTQHDDLSLAEAVQKERRTIFTALAADTYQEKYELINENEINPDQWKDTVAAVVNELKQRELNKVVLARETRLHFSQSIQLEQVLMNLFKLQRESFIFAFESNGDCFIGASPERLVKKSGSSFFTTCLAGSIARGKTDEEDRLLGDTLLADPKNIIEHEYVVRMIKEAMEEVCDEVTMPSKTQLLKTRDIQHLYTPVTGKAKKDTSLLLLVDRLHPTPALGGLPKEKAVEKIREVEELDRGFYGAPLGWVDYKGNGEFAVSIRSGLIQGDEASLFAGCGVVEDSNPESEYIETKIKFRPMLTALGGSNQ

SEQ ID NO: 93400 - protein, 99 aa, Bacillus pseudomycoides
  REGION 1..99: note = tr|A0A2B5TRQ0|A0A2B5TRQ0_9BACI Isochorismate synthase (Fragment) OS=Bacillus pseudomycoides OX=64104; GN = COL84_29255 PE=4 SV=1
MINTTISKNNSLDLLNEYQAGSTFFFASPFRTMLAEGINTIVHQDQIEKIPELIVEVLNNVKQMGHPNPIIVGAFPFDCNKGVKLIVPQECKIAERLQP

SEQ ID NO: 93401 - protein, 472 aa, Bacillus pumilus
  REGION 1..472: note = tr|A8FGL0|A8FGL0_BACP2 Isochorismate synthase MenF; OS = Bacillus pumilus (strain SAFR-032) OX=315750 GN=menF; PE = 3 SV=1
MVTTVQSTFRQEALATLEEANNVNHAVLISYSRRVDDLDPLAFFQSGEADFLGERFFWSDPESQMIFSGLGRAAVIKSSEQGKERFDTVHQEWEQLKQHMFHFHDEKELRQAAVGPLLFGGFSFDPYEEKARHWEAFGEAHFFVPSMMLTVSKEGTFLTINEWKQVDGNVHQLIQELEQKASQFKTLPLRYDGQAELVHMEELDVNEWMKAIQEATDHIRANEYEKVVLAREVLLHYKNQIELAPLLSALLKHQTTSYVFAVEQGRQAFVGATPERLVKKSGGEVFSSCLAGSIVRGKNEEEDKALGEELLHDEKNLIEHQIVVNMIEQAFEANCLRVHKPNQPSLYKTKNIQHLFTPIVGEIKNSCSLFSLIEQLHPTPALGGYPKEKAVEVIREIEPLKRGWYAAPVGWIDSQDNGEFAVAIRSGLIEEDHVRLFAGCGIVEDSLAKQEYEETQVKLRPMLSALGGCPIE

SEQ ID NO: 93402 - protein, 392 aa, Bacillus safensis
  REGION 1..392: note = tr|A0A5C0WHQ6|A0A5C0WHQ6_9BACI Isochorismate synthase DhbC OS=Bacillus safensis OX=561879 GN=dhbC PE=4; SV = 1
MKHSLLSSEEKIQLLQDYQPGAFFLASPKRTILAEGIFQHIETNQLNELSTRVAHVFDDAKQAGIQTPIVAGAVPFDPAQPVRLNVPVHVQFSDPLEFQQGDEESEAASPSYEVTPVPAPEVYMNGVNEGLAKIENGELSKIVLSRSLHLKANRDIHTKTILERLARHNTTGYTFAANVADPASSQKRTLLGASPELLLSKTGSSVISNPLAGSRPRSSDPVEDQRRRDELLTSAKDLHEHAVVVEAVTKALTPYCHTLDVPASPSVIQTETMWHLSTVVKGDLIDSSVSSIDLALSLHPTPAVCGTPTADAREAIQAIEPFDRGFFTGIIGWADTNGDGDWIVTIRCAEAEGHSLRLFAGAGVVKGSKAEEELAETSAKFNTMLHAMGIHQ

SEQ ID NO: 93403 - protein, 468 aa, unidentified
  source 1..468: note = Bacillus salacetis
  REGION 1..468: note = tr|A0A3A1R2V0|A0A3A1R2V0_9BACI Isochorismate synthase OS=Bacillus salacetis OX=2315464 GN=D3H55_06980; PE = 4 SV=1
MSIIQDIKIGGSFEKALAKAEAEGIPVLYSAVQKVSRVNPLSFYTKGFSLYNGERFFWKDKENNTQIAGLGSSYMLRNDSEDNRYDSIENEWKRLIGNAVIESEREIAGTGPLLFGGFSFDPTVPRSKEWSDFSHGIFQLPTFMLTVTEEGSYLTTNILCTSQDDETLLDIIDKKQRELLGQPEERDSALTLLKAVEIAPEEWKASLEGVVSQLKAGEMDKVVLARKMLMAFKDKPSSDEVIHNLLNEQRDSFIFSLEVANSCFLGASPERLVKKEDAEILSTCLAGSIARSTDPEEDRRLGESLLGDEKNRHEHHLVVEMIKDVLDQHCSEVQIPDEPVLMKVRDIQHLYTPVKGKAGNGTSILKFVSQLHPTPALGGVPRDKAMETIKEAENMDRGLYAAPMGWMDAYGNGEFVVSIRSGLIHKDEAFLFSGCGVVADSTAESEYRETQIKFKPMFRALGGNTDGL

SEQ ID NO: 93404 - protein, 474 aa, unidentified
  source 1..474: note = Bacillus salsus
  REGION 1..474: note = tr|A0A1H0QGU1|A0A1H0QGU1_9BACI Isochorismate synthase MenF OS=Bacillus salsus OX=930152 GN=menF PE=3; SV = 1
MVLKQHSNNTIDQVRKGVSRTQEQHNNHVLLSRVVEAKNIDPLLFFEAGKTFFEGERTFWANPSFNTILVGLGKAHEIEVDRSANRFDEVETKWKELINQLDDKNEMKYGTGPILFGGFSFDPKRNKTSLWNDFSNATFVLPKILLSVIDGECYFTFNHISGPNGDTEVLDNIEEIKNQLVNSMNEKIGHHEEMKKEFVKSEVNPEKWMSSVKEVVNDIKNGDVEKVVLAREINLTFKNQINIDEVLFNLREQQPMSYLFVFENKHACFIGASPERLIKKKANTIKSTCLAGSIGRGQTINLDQELGKQLLQDQKNMIEHEVVVSMIKEAMIASCKTISSSNRPQLLKMRHIQHLYTPIKGEAKSDVSLLSMVKKLHPTPALGGFPSNKAIEKIREVELLDRGWYAAPIGWVDGNDNGEFAVAIRSGLLRGKDASLFAGCGIVADSDPIEEYKETNIKFKPMLSALGGLEDESN

SEQ ID NO: 93405 - protein, 468 aa, Bacillus selenatarsenatis
  REGION 1..468: note = tr|A0A0A8X950|A0A0A8X950_9BACI Isochorismate synthase MenF OS=Bacillus selenatarsenatis SF-1 OX=1321606; GN = menF PE=3 SV=1
MVAIQETELRQGILDAIERAKGQSQSVLVSEVHKIDRIDPFYFFASGREKFFGERFFWKDPEGEDFLAGLGICGQIQSDQGADRFFHVEKEWKRFMGTALVFNKHNVNGTGPSMFGGFTFDPLKKKTSLWSKFSEALFHIPKYMLTIVKGEAYFTTNVICTQHDDMSLFDKVTREREEVLSNAGQKPALGRLDLKDIIEIDPEAWKQTVTDVVNGFENSELKKVVLARELRLHFTDEVQSESVLANLLENQHKSFTFAFESNGDCFIGASPERLVKKDGASLFSACLAGSIARGITPDEDESLGEELLTDEKNLIEHQYVVDMIKGAMEETCDEVILPEQPVLMKMKYIQHLYTPVIGRNREGTSLLHLVNRLHPTPALGGLPKQAAIVKIREIEQLDRGLYAAPVGWMDYQGNGEFAVAIRSGLIQGNEASLFAGCGIVADSNAESEYKETSIKFRPMLTALGGKIT

SEQ ID NO: 93406 - protein, 398 aa, Bacillus siamensis
  REGION 1..398: note = tr|A0A2K9KCY4|A0A2K9KCY4_9BACI Isochorismate synthase OS=Bacillus siamensis OX=659243 GN=CWD84_04830; PE = 4 SV=1
MTNQHLLTEVSAKEVLDAYKPGAFFLASPKSTLLAEGVFAKVPDTDAENQLDSLPERVRQTLLEAKQAGIKHPIAAGAIPFDGRKASRLFVPKAVLTAGPLSFTEASAEKPQANTYDIRPVPDPEGFMSGVEQGVLNITDGPLSKIVLSRTLHLTAERDIDIPQAVKHLAQHNPRGYTFAADVTGTSETRKTLFGASPELLLSKNGTSILSNPLAGSRPRSTDPAEDQRRAEELLQSAKDLHEHAVVVAAVAAALKPFCRVLDVPEKPSLIKTEAMWHLSTVVKGELSDPSTTSLELAIALHPTPAVCGTPTDAAREAIQNIEPFDRNFYTGMAGWCDAEGDGEWIIALRCAEAETRSLRLFAGAGIVAGSKPQDELDETSAKFRTMLRAMGLYQDEM

SEQ ID NO: 93407 - protein, 407 aa, Bacillus simplex
  REGION 1..407: note = tr|A0A109MU15|A0A109MU15_9BACI Isochorismate synthase OS=Bacillus simplex OX=1478 GN=AS888_08665 PE=4; SV = 1
MIKSKENSTVLEKQLLDDYEVGDFFLASPSQTILGKGSFLTVPNDRENRDQMTSLAARVAAALKTAKEQGHPNPMVTGAVPFDYEKDAQLIVPGMIWTSVPLQDLGTSQQAGTSKPDYEIESVPEPSRYMDGVEQGLTHIKSGHLDKIVLSRSLHLTSSEQVNINRLLQNLARHNKNGYTFAVDLPQPETENADPDNLKTLIGASPELLVSRTGLQVVANPLAGSRPRSDDPIEDKRRAEELLSSAKDLHEHAVVVQAVAEALRPFFKKMDVPEKPSVIHTETMWHLSTEVRGELQDPETSSLELAIALHPTPAVCGSPSELAREAIQEIEPFDRGFFTGMVGWCNAEGDGEWIVTIRCAEVEKQVLRLFAGAGVVAESKPEEELAETSAKFQTMLRAMGIDAKSLN

SEQ ID NO: 93408 - protein, 470 aa, Bacillus smithii
  REGION 1..470: note = tr|A0A0H4P2B1|A0A0H4P2B1_9BACI Menaquinone-specific isochorismate synthase OS=Bacillus smithii OX=1479; GN = BSM4216_2994 PE=4 SV=1
MSIKSHHLPVQLMSKLENRKRKNQAMLFSITEEMDFIDPLAFYYGNDSVYSGERFFWKDSESDTIIVGVGNAAVLRSEKGIKERYKEIEEKWNHLLKEAVIENAHKEVMGTGPLLFGGFSFDPGTIKEEKWAPFSSAYFVLPSFMVTIKKDRTYLTSNVIHTAHEEDDFLEKWISQKEKVIRNAKEVPGRMTAIVNVAEHGSNEWKQAVHKAVEQIHRNETLKKVVLARMLTVQFQERPFLEAVLKRLWEEQHESFLFALETMNRCFLGASPERLVQKWHENVLSTCLAGSIRRGKDLKEDQKLGQELMGDRKNRKEHQLVVDMIGSVINSLCENVQIPEQPELLKLSDIQHLFTPVVGKNRQNMSVLQFVERLHPTPALGGLPQQEGLEKIRQLEGIDRGLYGGPIGWIDGDGNGEFAVAIRSGLFHDAQAYLYAGCGIVADSEAESEYIETSIKFRPMLRAIGGDIHE

SEQ ID NO: 93409 - protein, 467 aa, unidentified
  source 1..467: note = Bacillus solani
  REGION 1..467: note = tr|A0A0Q3TCN0|A0A0Q3TCN0_9BACI Isochorismate synthase MenF OS=Bacillus solani OX=1637975 GN=menF PE=3; SV = 1
MVTIQETELKEGILKAIERAKALSKPVLVSEVQEINHIEPLTFFAAGHEPFLGERFFWKDPADETFIIGLGICKQIQSDQAADRFFLVEEEWKNFIEDAIIDNPFQLNGIGPLMFGGFSFDPYKEKTRLWSKYSDSLFHIPKFMYSEINGRTFFTTNIVCTQHDDLSLAEAVQKERRTLFTALADDIYQEKYELINEDEINPEKWKDTVAEVVNELKQGELNKVVLARETRLHFSQSIQLEQVLMNLFKLQRESFIFAFESNGDCFIGASPERLVKKSGASFFTTCLAGSIARGKTEEEDRVLGDTLLADPKNIIEHEYVVRMIKAAMEEVCEEVTMPSKTQLLKTRDIQHLYTPVTGKAKKDTSLLLLVDRLHPTPALGGLPKEKAVEKIREVEELDRGFYGAPLGWVDYKGNGEFAVSIRSGLIQGDEASLFAGCGVVEDSNPESEYVETKIKFRPMLTALGGSN

SEQ ID NO: 93410 - protein, 401 aa, Bacillus sonorensis
  REGION 1..401: note = tr|M5PC21|M5PC21_9BACI Isochorismate synthase DhbC; OS = Bacillus sonorensis L12 OX=1274524 GN=BSONL12_17159; PE = 4 SV=1
MIDHQMVSEALAEQLLHEYRTGASFFFSSPERTILAKGVFAAVPEEDGSGLEHLSQRAAAVLRDAEQSGRKRPIIVGAVPFDNAKPAQLTVPDEVWCAGPLVFEQSVQKHSQQGMAYDIQPVPEPEAYIRGVERGLAGIAAGDYSKIVLSRSLRLTSPEKIDIGRLLQNLAQHNTNGYTFAVDLPERAKEESHSARTLIGASPELLVSRTGFRVSANPLAGSRPRSDDPVEDQRRADELLASAKDRHEHAVVVQAVAAALKPFCRKLNVPAEPSLISTETMWHLSTEINGELTDLSISSLELAAALHPTPAVCGTPTDKARAAIKEIEPFDRGFFTGMVGWCDSVGDGEWVVTIRCAEAEDHALRLFAGAGIVAGSRPEDELAETSAKFRTMLLAMGLNNE

SEQ ID NO: 93411 - protein, 471 aa, Bacillus sp.
  REGION 1..471: note = tr|A0A1J5WWE7|A0A1J5WWE7_9BACI Isochorismate synthase MenF OS=Bacillus sp. FMQ74 OX=1913579 GN=menF; PE = 3 SV=1
MVTTVQRTFRKEVLHALHKAKEVNHAVLISYSRQIESLDPLSFFNYRAKKYTGNRFFWSDPESELTIVGLGKEAVFQTNQKNSERYREVFEQWERFKKTAFHIYEEEKLQHSAVGPVLFGGFSFDPCEERGSQWDHFSEGDFFVPALMLTMTAEGPFLTVNRWVKGEEDAEAVLEGLQAFAAEFMIPGFKQEDQAVIAEVQELDKDDWLKAIETATSQIKEKQYDKVVLARELLLTFDGPIQIEPVLKALLNDQQTSYVFAIEKEGKTFVGASPERLIKRDGSTVMSTCLAGSIKRGVNEEEDRRIGLELLNDEKNLLEHDIVVSMIHNAFESACSEVEKSDGPVLYKTKSVQHLFTPIVGQLRDSASIFDLIEKLHPTPALGGAPKEKAVEVIREIEPMTRGWYAAPIGWIDSQDNGEFAVAIRSGLIEGSTARLFAGCGIVEDSEPISEYEETQIKLKPMISALGGERR

SEQ ID NO: 93412 - protein, 468 aa, Bacillus sporothermodurans
  REGION 1..468: note = tr|A0A150KKK2|A0A150KKK2_9BACI Menaquinone-specific isochorismate synthase OS=Bacillus sporothermodurans; OX = 46224 GN=B4102_4161 PE=4 SV=1
MKMEQMDIVDEYKIALTKAKNKNKTLLFSYTEQLNNIDPLSFYSSAKAIFQVERFFWKVPNDEMIIVGLGSAHTFQTEVGEGRFEYIEREWNQFIHDAHVYNPFDVQGTGPVIFGGFSFDPLSMKESEWTPFYNALFHLPKLMLIINKQEVFLTTNILCHSNDNLDKLNHHLKLKREIFEGKVSKSIENINIKQEHELNQQAWIDSVAEVVDLLKKEKKLNKVVMARKMNIEFNDKVAAEKVLENLWEEQHESYIFALETENSCFTGASPERLVKKNGNTIVSACLAGSIKRGNSISEDEALAEALFNDEKNRHEHQLVVSMIAEIIRKYCLNVDIPELPSVMKMRDIQHLFTPVNGIIKDDHISIFPLVKDLHPTPAMGGVPTIEALQIIREKEKMDRGFYASPIGWVDYRGNGEFAVAIRSGLIKENEAFLYAGCGVVSDSNPEDEYFETKIKFRPMLRALGGKKL

SEQ ID NO: 93413 - protein, 518 aa, Bacillus stratosphericus
  REGION 1..518: note = tr|M5R124|M5R124_9BACI Isochorismate synthase MenF; OS = Bacillus stratosphericus LAMA 585 OX=1236481 GN=menF; PE = 3 SV=1
MFSLLSSSVKVYNRKAGHSTYSNVHVFFYMMVLFLYVISWILEECIMVTTVQSTFRQEALATLEEANNVNHAVLISYSRRVDDLDPLAFFQSGEADFLGERFFWSDPESQMIFSGLGRAAVIKSSEQGKERFNLVHQEWEQLKQHMFHFHDEKELKQAAVGPLLFGGFSFDPYEEKARHWEAFGEAHFFVPSMMLTVSKEGTFLTINEWNEVDGNVHQLIQELEQKASNFDALPVRNHGQAELVHMEELDVQEWMKAIHEATEHIRVNEYEKVVLAREVLLHYKNQIELAPLLAELLKHQTTSYVFAIEQGRQAFVGATPERLVKKSGGEVFSSCLAGSIVRGQDEVEDQALGEELLHDEKNLIEHQIVVNMIEQAFEANCHHVHKPNQPSLYKTKNIQHLFTPIVGEIKSSCSLFSLIEQLHPTPALGGYPKEKAVEVIREIEPLKRGWYAAPVGWIDSKDNGEFAVAIRSGLIEEDQVRLFAGCGIVEDSLAKQEYEETQVKLRPMLSALGGRPIE

SEQ ID NO: 93414 - protein, 468 aa, Bacillus subterraneus
  REGION 1..468: note = tr|A0A0D6Z8L9|A0A0D6Z8L9_9BACI Isochorismate synthase MenF OS=Bacillus subterraneus OX=285983 GN=menF; PE = 3 SV=1
MVAIQETELKQGIFNGIARAKGRSQSILVSEVHKIEHLDPVDFFAAGREKYLGERFFWKDPEGKLVLAGLGICGQIQSDQAADRFFHVEKEWKRFMDSALIINKYQRNGMGPTLFGGFSFDPQKQGTALWSKFPEALFQIPKYMLTLSNGEMFLTTNVICTHHDDLTLFEKVSRERQEVLSKAAMKQSFAQPKLKKMVEIEPEAWKQAITHVVKDLKQSELKKVVLARELRLHFDEEVQAERVLVNLLDHQNDSFTFVLESNNDCFIGASPERLVKKEGKSLYSACLAGSIARGNTPEEDDRLGSELLSDQKNLMEHQYVVEMIKEAMEETCNEVLLPEQPVLMKMKYIQHLYTPVIGKNRAGTSILHLVNRLHPTPALGGLPKQAAIEKIREMEQLDRGLYAAPVGWMDYQGNGEFAVAIRSGLIQGKEASLFAGCGVVADSNAESEYKETSIKFRPMLTALGGKIT

SEQ ID NO: 93415 - protein, 471 aa, Bacillus subtilis
  REGION 1..471: note = sp|P23973|MENF_BACSU Isochorismate synthase MenF; OS = Bacillus subtilis (strain 168) OX=224308 GN=menF PE=3; SV = 2
MVTTVQRTFRKEVLHALHKAKEVNHAVLISYSRQIESLDPLSFFNYGAKKYTGNRFFWSDPESELTIVGLGKEAVFQTNQKNSERYREVFEQWERFKKTAFHIYEEEKLQHSAVGPVLFGGFSFDPCEERGSQWDHFSEGDFFVPALMLTMTAEGPFLTVNRWVSGGEDAEAVLEGLKAFAAEFMVPDFKQEDQAVIAAAEELDKDDWLKAIETATSQIKEKQYDKVVLARELLLTFDGPIQIEPVLKTLLDDQQTSYVFAIEQEGKTFVGASPERLIKRDGGTVMSSCLAGSIKRGVNEEDDRRIGLELLNDEKNLLEHDIVVGMIHNAFVSSCSEVEKPDGPVLYKTKSVQHLFTPIVGQLRESASIFDLIEKLHPTPALGGSPQEKAVDVIREIEPMSRGWYAAPIGWIDSQDNGEFAVAIRSGLIEGSTARLFAGCGIVEDSEPISEYEETQIKLKPMISALGGERR

SEQ ID NO: 93416 - protein, 474 aa, unidentified
  source 1..474: note = Bacillus swezeyi
  REGION 1..474: note = tr|A0A5D4Q948|A0A5D4Q948_9BACI Isochorismate synthase MenF OS=Bacillus swezeyi OX=1925020 GN=menF PE=3; SV = 1
MVTTVQRTFLREEPEALNVVKQVNHAVLISYSRKIEGLNALSFFKSGEEKYAGNRFFWSDPDGEMTLVGLGKEITVSTDQKDAGRYRDIHEKWERLKEKAYHFHEGERRSQTPAGPLLFGGFSFDPLEERDQHWNGYQEGAFFIPSVMLTQEREESFLTLNQWKAPNEDVRFVLAHLKAAASQILKQNVLQENEKGHPLCVSREELHLPQWFDAIRQATDEIKTGKYDKVVLARETLLTFNKPVQLHDVLFNLMSEQKTSYIFAIEENGKSFVGASPERLIKKDADKVLSTCLAGSIKRSENEQEDRMLGLELLNDEKNLIEHDIVVNMIFKAFLSNCSQVKKPDMPGLYKTKNVQHLYTPVVGKMNEESSLFHLIEQLHPTPALGGAPQQKAVEVIRNIEPMSRGWYAAPAGWIDMRGNGEFAVAIRSGLIESKEARLFAGCGIVADSDPALEYEETQMKLKPMLSALGGDTR

SEQ ID NO: 93417 - protein, 465 aa, Bacillus taeanensis
  REGION 1..465: note = tr|A0A366XYV1|A0A366XYV1_9BACI Isochorismate synthase MenF OS=Bacillus taeanensis OX=273032 GN=menF; PE = 3 SV=1
MVGIQQHELHNLLVQGVERACKQNTTVLVSHTIEVKTPVHPFSFFTSGSHYKGSRSFWSDPTGEFQLVGLGTCIALNSNFSKRFRGVEKEWKELLQSSIIHAPNNEPGTGPTLIGGFSFDPLKPKTELWRCFPDTRMTLPTFMLTVNKEKTWLTINALLDEENHPSTIANQLMKEQEMLLKNTDITLPEPAPFYIEEIVPQEWMRTVEKTAKQIQEGIIEKLVLAREVRIHSEEVLSAESILFTLYHQQPQSYLFAFESENDCFLGASPERLVKREGDRFLSTCLAGSIRRGVSKEEDIQLGESLLNDEKNRHEHQLVVDMIKEAMVAVCEEVYAPTEPILYKARDIQHLYTPVTAKADNHSLLAVVEQLHPTPALGGYPQKEAVKKLREMEKLDRGWYAGPIGWIDYRQDGEFAVAIRSGLLQGKEASLFAGCGIVGDSDPLSEYKETQIKLQPMLSALRGNHS

SEQ ID NO: 93418 - protein, 398 aa, Bacillus tequilensis
  REGION 1..398: note = tr|A0A2X0X6B8|A0A2X0X6B8_9BACI Isochorismate synthase OS=Bacillus tequilensis OX=227866 GN=dhbC PE=4; SV = 1
MLEQNVLSQTKAEHLLHEYRAGAFFLASPHRVLLAKGVREIVPEADGQNQIETLSGRIAETLNQAKQSGQSRPLVVGAVPFDHVKAARLVVPEEVSWSGPLQFDHAEKELQTEYTYHIEPVPAPEDYKYGVEQGLAHIADGILSKIVLSRSLHLTSSEPIQTDELLHHLARHNTHGYTFAADVSSEAETSSSRTLLGASPELLVSRMGTQVVSNPLAGSRPRSDDPAEDQRRAAELLSSAKDLHEHAVVADAVAAALRPFCRTLDVPEKPSLIKTETMWHLSSVIKGELSDPSVTALELAAALHPTPAVCGTPTDLAREAILSIEPFDRGFFTGMVGWCDDAGDGEWIVTIRCAEAEERSLRLYAGAGVVAGSKPEDELQETSAKFRTMLRAMGVKHI

SEQ ID NO: 93419 - protein, 463 aa, unidentified
  source 1..463: note = Bacillus terrae
  REGION 1..463: note = tr|A0A429X0Y2|A0A429X0Y2_9BACI Isochorismate synthase OS=Bacillus terrae OX=1914933 GN=D5F11_024275; PE = 4 SV=1
MLINSPYQTKYINTLKHKAQSNKVLASYTKKVDKIDPFTFYQISKPANDGKRFFWKSPDDDTTIVGVGLLRSFSNSGAEDRFRRIETEWKEILSSAVIDNPFHLPGTGPLLFGGFSFDPYSLKEEKWQPFGDALFYLPEYMLTVIGEEYYLTVNLFESEELVNQSNKVKNFDLIIKNAGLSEASASYLISKEELFVPQWLDSVAEVVNILKSSDLVNKVVLSRQMQLNFSEPVLSEYVLKQLHTQQKDSFIFLLETPEGSFAGASPERLVKKIDDQVLSTSLAGSIGRSENAVEDRELGNILLNDEKNLYEHSLVVDMIKKALKPHCNELQVPDQPILLRTPYIQHLYTPVSGVAKPETSIFNLVGELHPTPALGGVPTGQAMKIIRDEEKMDRGFYASPIGWTDFDGNGEFIVAIRSGLLKGKQAFLYAGCGLVADSDPKEELKETGIKFQPMLQAIGGKSE

SEQ ID NO: 93420 - protein, 465 aa, Bacillus thermoamylovorans
  REGION 1..465: note = tr|A0A0D0FWM1|A0A0D0FWM1_9BACI Menaquinone-specific isochorismate synthase OS=Bacillus thermoamylovorans; OX = 35841 GN=B4064_2643 PE=4 SV=1
MLLAENQAIAHSNIIKQLETKQKTLFSLMTPIDPFDPVVFYKQGTPITEGKRFFWKSANEDFYLVGVGAALLFSNLAKKNRFDDIHQFWKDIVQNAEIEGSSIIGTGPLLFGGFSFDPDTGKEQEWSDFGDTFFYLPKYMLTIVNGQHFLTFNQIMDPAGENKTSLYKHIEEYMNDLLARQSTVAVEQVSMTSCTEIGQAEWVKAVEEIVNLLKSTDIKKVVLARKMIIEFSKSPSIATVLEQLRRNQPGSFTFALESGSSCFLGASPERLVKKTGEEVLSTCLAGSAPRSKDPGEDEWLGKNLLNDAKNRYEHQLVVNMIKNALNPICTNLIVPEEPILMKTPAIQHLYTPITGRAKAGQSIFKMVERLHPTPALGGVPTIEALRIIREKEKMDRGLYAGPIGWTDFRGNGEFIVGIRSGLIQNNNAILYAGCGLVPDSNPQDELIETRIKFRPMLHALGGEEK

SEQ ID NO: 93421 - protein, 1027 aa, unidentified
  source 1..1027: note = Bacillus thermocopriae
  REGION 1..1027: note = tr|A0A410XMD1|A0A410XMD1_9BACI Multifunctional fusion protein OS=Bacillus thermocopriae OX=1215031; GN = menF PE=3 SV=1
MVTLYQNKVIDQLRHVLGKKEHMVSITIRMEQIDPLAFFSAGETLFYGQRFYWSDCLHERTFVGLGRAQVIKSKEKTKKRFRDVEREWKQIVEGAFIEGQGPLMFGGFAFDPLKQSDEHWIEFPSAQFVVPTFLLTKQRDEIWLTVNVVHESLNQIEEMIDSLFHTRDESDWHRAHIVKKEEVARAQWLRAVHYATDLIRNDAIEKVVLARKLFLSFSDRINCSQVLHELHEQQPMSYIFAFENGSTCFIGASPEQLVRKNGHMCETACLAGSIRRGHTVKEDEELGRWLLQDDKNRREHAFVVNMIKQAMNEVCTEVVIPNEPTLLKMRHIQHLYTPVQAKVKEGVSIFSLVERLHPTPALGGFPKEKAVQTIREIEPLDRGWYAAPIGWVDANGNGEFAVAIRSALLEDNKAHLFAGCGIVAHSDPHNEYEETNVKFKPMLSALGGMEMNEMTAYVTAFVEQLAHMGVQQVVISPGSRSTPLAMVMAEHPTLNIHVHIDERSAAFFALGMAKASGEPVALVCTSGTAVANYYPAIVEAYYARVPLVVITADRPHELRDVGAPQAINQLHMYGSYVKWFVDMALPEGNERMLRYAEMVAARAVYVASSVPKGPVHINVPLREPLVPTIDEPLFLPSSPTRIVYKGNKHLCEEMIDELYAELSGVEKGVIICGDLHIEGFSEAVVKLAEALQYPILADPLSPLRTGTHEKRCIIESYDAMLKNETFADKFVPDVVIRFGAMPVSKSLYVWLQKHKQVKQIVVDEAGQWRDPTLSLQVLIEANEVQFCYDLAQRASHSFRSSQWMSKWQYMNERAKHILLKAEEETSMFEGKIFIELANLLPDKATLYVGNSMPIRDADTFFMSSNKRIRLLANRGANGIDGVVSSALGASYVSQPLVLVIGDLSFYHDLNGLLAAKLQQLHATIIVLNNNGGGIFSFLPQANEPKHFERLFGTPTHLSFQHAVDMYNGHYEKVETWEHFRRAMTDALSRPTLNVIEVPTSREYNVKIHRKLWKDVSQEMSNLLNKGE

SEQ ID NO: 93422 - protein, 399 aa, Bacillus thuringiensis
  REGION 1..399: note = tr|Q6HJ05|Q6HJ05_BACHK Isochorismate synthase; OS = Bacillus thuringiensis subsp. konkukian (strain 97-27); OX = 281309 GN=entC PE=4 SV=1
MNEFTAVKELSEKLLEDYKTESSFFFASPTRTILAEGEFTTVKHHEIESFPELVQAVLRNAKQAGNPNPIVVGALPFDRRKEVQLIVPEYSRISERLQLDTTNHLEINRNLTFEMTPVPDHEVYMNGVKQGIEKIKDGDLKKIVLSRSLDVKSSGKIDKQKLLRELAEHNKHGYTFAVNLPKDENENSKTLIGASPELLVSRHGMQVISNPLAGSRPRSDDPVEDKRRAEELLSSPKDLHEHAVVVEAVAAALRPYCHTLHVPEKPSVIHSEAMWHLSTEVKGELKNPNTSSLELAIALHPTPAVCGTPMEEAREAIQQIEPFDREFFTGMLGWSDLNGDGEWIVTIRCAEVQENTLRLYAGAGVVAESKPEDELAETSAKFQTMLKALGLNDSSLNEK

SEQ ID NO: 93423 - protein, 463 aa, unidentified
  source 1..463: note = Bacillus timonensis
  REGION 1..463: note = tr|A0A4S3PZ19|A0A4S3PZ19_9BACI Isochorismate synthase MenF OS=Bacillus timonensis OX=1033734 GN=menF; PE = 3 SV=1
MIQQKGLSDYIKKGINRSKELSRPVLISQVKEMKNIDPLLFFAAGKRTPFETRSFWSNPTNDTIIVGLGEAYTISDNESTERFEAIEKQWKRLVQHSIIVDDFAPYSTGPILMGGFSFDPLKKRTELWDYFDDAKFVLPVIMLSYYKGSTYLTTNIICEPNGTTFGGSDLEQLEVLLKENYKYQKNHSFTKEEVQPQEWMDSVRNATKKVQNGEVEKVVLAREIKLHFDEPIEADAVLARLKEEQPMSYLFAIEYKNSCFIGASPERLIKKKGEEFLTTCLAGSIRRGKTPSEDKQLENELLHDPKNLHEHDVVVQMIKNAMKESCSSITSPTHPGILKMRDIQHLYTPVKGVAKDDVSLLTVVNRLHPTPALGGQPKQKAFEIIRELEILDRGWYGSPVGWFDTNDNGEFAVAIRSGLLNGNNASLFAGCGIVGDSQPESEYTETMIKFRPMLSALGGLYNE

SEQ ID NO: 93424 - protein, 399 aa, unidentified
  source 1..399: note = Bacillus toyonensis
  REGION 1..399: note = tr|A0A2A8HAB9|A0A2A8HAB9_9BACI Isochorismate synthase OS=Bacillus toyonensis OX=155322 GN=CN585_22005; PE = 4 SV=1
MNELTAVKELSEKLLEDYKTESSFFFASPTRTILAEGEFTTVKHREIESFPELVQATLSNAKQAGNPNPIVVGALPFDRRKEVQLIVPEYSRISERLQLDTTNQLETNENVTFEMTPVPDPEVYMNGVKKGIEKIQDGDLKKIVLSRSLDVKSSEKIDKQKLLRELAENNKHGYTFAVNLPKDENENSKTLIGASPELLVSRSGMQVVSNPLAGSRPRSDDPAEDKRRAEELLSSPKDLHEHAVVVEVVAAALRPYCHTLHVPEKPSVIHSEAMWHLSTEVKGELKNPNTSSLQLAIALHPTPAVCGTPMEAAREAIQKIEPFDREFFTGMLGWSDLNGDGEWIVTIRCAEVQENTLRLYAGAGVVAESKPEDELAETSAKFQTMLKALGLRDNSLNEK

SEQ ID NO: 93425 - protein, 464 aa, unidentified
  source 1..464: note = Bacillus tropicus
  REGION 1..464: note = tr|A0A4Y6F085|A0A4Y6F085_9BACI Isochorismate synthase OS=Bacillus tropicus OX=2026188 GN=FJR70_18255; PE = 4 SV=1
MIQTKQIGLQEVLSAAIKRATDEKIMVSFVKQIDWMDPLLFYAAGKRIAFENRCYFADPAQHVIFAGIGSVFTIATASHKRFQTARDEWDKVKEKAYVQRERYEFGTGPLLFGGFSFDQEKEKTDLWKEFDDTTFSLPAFLLTVKNEKAWLTMNTFVSATDCAETLYNKIVSLEEKILEESKCALQGSKLTVTSKVEVDPKGWMKAIEKVQDEMKQGNVQKVVLARELKVEMDHHIDSALVLEALRIGQPDCYVFSFDYKGACFLGATPERLIRKEDEKFTSMCLAGSTGHGQSIEESKRNSNALLHDEKNLAEHGYVVNMIRSVLNEHCEYVNIPESPGLLTTKNLIHLYTPVEAKGTASLLTMVEELHPTPALGGTPRLEAMKLIRDVELLDRGLYGAPIGWIDDEGNGEFAVALRCGLLNGEKASLFAGCGIVIDSVPQLEYEETSLKFRPMLGALEELMK

SEQ ID NO: 93426 - protein, 470 aa, Bacillus vallismortis
  REGION 1..470: note = tr|A0A1W6HLR3|A0A1W6HLR3_BACVA Isochorismate synthase MenF OS=Bacillus vallismortis OX=72361 GN=menF; PE = 3 SV=1
MVTTVQHTFREEADHALHKAKQVNHAVLLSYSRRIASLDPLSFFKDGAKKYKGKRFFWSEPGSELTIVGLGTEALFQSNEKNGKRYHDVFEQWERFKKTAFHIHEEEAAHTAVGPVLFGGFSFNPAEERGDEWNGFEEGLFFIPSLMLTKTADGDYLTVNQWAADGNQAEDTLKRLKSFSEAFSVSSIEYEEYPVLTKAEELDVENWLEAIKTATNDMKANQYDKVVLAREVVLSYDGPIPTESVVRKLLKDQTTSYVFAIEQGDKCFVGASPERLIKKSGKDVMSTCLAGSIKRGENQQEDDRLGKELLHDEKNLAEHDFVVQMIHDSFLSSCSDVKKPAGPQLYKTKSVQHLYTPITGHLKTSASLFDLIEKLHPTPALGGAPQQKAVEVIADIEPMTRGWYAAPIGWMDGRENGEFVVAIRSGLIEGKNARLFAGCGIVEDSDPQSEYEETQIKLKPMISALGGERL

SEQ ID NO: 93427 - protein, 471 aa, unidentified
  source 1..471: note = Bacillus velezensis
  REGION 1..471: note = tr|A0A563AHW5|A0A563AHW5_9BACI Isochorismate synthase MenF OS=Bacillus velezensis OX=492670 GN=menF; PE = 3 SV=1
MVTTVQHTFREEADHALHKAKQVNHAVLLSYSRRIASLDPLSFFKDGAKKYKGKRFFWSEPGSELTIVGLGTEALFQSNEKNGKRYHDVFEQWERFKKTAFHIHEEEEAAHTAVGPVLFGGFSFNPAEERGDEWNGFEEGLFFIPSLMLTKTADGDYLTVNQWAADGNQAEDTLKRLKSFSEAFAVSSIEYEEYPVLTKAEELDVENWLEAIKTATNDMKANQYDKVVLAREVVLSYDGPIPAESVVRKLLTDQTTSYVFAIEQGDKCFVGASPERLIKKSGKDVMSTCLAGSIKRGENQQEDDRLGKELLHDEKNLAEHDFVVQMIHDSFLSSCSDVKKPAGPQLYKTKSVQHLYTPITGHLKTSASLFDLIEKLHPTPALGGAPQQKAVEVIADIEPMTRGWYAAPIGWMDGGENGEFVVAIRSGLIEGKSARLFAGCGIVEDSDPQSEYEETQIKLKPMISALGGERL

SEQ ID NO: 93428 - protein, 468 aa, Bacillus vietnamensis
  REGION 1..468: note = tr|A0A0P6WRR7|A0A0P6WRR7_9BACI Isochorismate synthase MenF OS=Bacillus vietnamensis OX=218284 GN=menF; PE = 3 SV=1
MVTIHKTNIEKAYDTARMKAKQIHRPVLLSIVEEVDAVDPLSFYYGGNSFHGERFLWKDRDHTVTLVGLGAAHILSTDEKEERFFTVENEWKRFIEESVIVTGDKWAGTGPLLYGGFRFDPMNTNSEEWNDFSAGTFQLPMFMLTKPEKTNYLTMNVICHPDEDDSLFHERIGLKEELLANARKAFIPERPEWIGTRDVKPEEWKESVQSVVNRLQKGEMDKVVLARKCEVSFDQQVSSDFVLDNLWKQQPDSFVFSFEWEGSCFIGATPERLVKKTGEEILSTCLAGSIARGDTLESDEKLGEELLGDEKNRYEHHLVVDSIQHALHPFCDTLSIPSSPQLMKLKDIQHLYTPVIGQASEHTSLLNLVEKLHPTPALGGVPRDKAMHVIRQEEDMDRGLYAAPIGWIDAYGNGEYAVALRSGLLQGDKAYLYAGCGIVADSEPESEFKETQMKFRPMLRALGGTVHD

SEQ ID NO: 93429 - protein, 466 aa, unidentified
  source 1..466: note = Bacillus weihaiensis
  REGION 1..466: note = tr|A0A1L3MNN7|A0A1L3MNN7_9BACI Isochorismate synthase MenF OS=Bacillus weihaiensis OX=1547283 GN=menF; PE = 3 SV=1
MITTLDDTMKEHIEQALEEAKQTNQSVIVSRVKEVDAINPLHFYASGEKLFFGERFIWSTPERDFTLIGLGKEHVFENNKTSERFSDIESEWKRLNKKIVSNYTQQLGTGPLLFGGFSFDPSKEKNTLWQNFPEAKFVLPTMMLTRLNHKTFITVNRMITPYDQLDDCIKHFEQTLEVSFHPIDCEKVNEFSEIEYQTSQWLKAVEKATNDIKEEKIDKVVLAREVHLKFTEEINSNNVISRLQKEQPTSFIFGLENGNQNFVGATPERLIKKVDQEVSSTCLAGSIKRGKTKKQDLVLGEQLLNDRKNLIEHTIVVKMIKEALNECCYEIISPKAPALLKTKSIQHLYTPVKGYIKKGNSLLSLVDKLHPTPALGGFPKQKAIEKIRELEPMHRGWYAAPIGWIDHEDNGEFVVAIRSGLLEGHNAALFAGCGVVAESDPKSEYLETKIKLKPMLSALGGLENEW

SEQ ID NO: 93430 - protein, 464 aa, unidentified
  source 1..464: note = Bacillus wiedmannii
  REGION 1..464: note = tr|A0A4U2VAV5|A0A4U2VAV5_9BACI Isochorismate synthase OS=Bacillus wiedmannii OX=1890302 GN=FC696_02435; PE = 4 SV=1
MIQTKQIGLQEVLSAAIKRATDEKILVSFVKQIDWIDPLLFYAAGKRISFENRCYFADPAQHVIFAGIGSVFTIATSSHKRFQTARDEWDKVKEKAFVQRERYEFGTGPLLFGGFSFDQEKEKTDLWKEFDDTTFSLPAFLLTVKNEKAWLTMNTFVSATDCAETLYNEIVSLEEKIFWESKCALEGSKLTVTSKVEVDPKGWMKAIEKVQDEMKQGNVQKVVLARELKVEMDHHIDSALVLEALRIGQPDCYVFSFDYKGACFLGATPERLIRKEDEKFTSMCLAGSTGHGQSIEESKRNSNALLHDEKNLAEHSYVVNMIRGVLNEHCESVNIPESPGLLTTKNLIHLYTAVEAKGDASLLTMVEELHPTPALGGTPRLEAMKLIRDVELLDRGLYGAPIGWIDDEGNGEFAVALRCGLLNGAKASLFAGCGIVIDSVPQLEYEETSLKFRPMLGALEELMK

SEQ ID NO: 93431 - protein, 472 aa, unidentified
  source 1..472: note = Bacillus xiamenensis
  REGION 1..472: note = tr|K2NHM3|K2NHM3_9BACI Isochorismate synthase MenF; OS = Bacillus xiamenensis OX=1178537 GN=menF PE=3 SV=1
MVTTVQRTFRQEALATLEEANNVNHAVLISYSRRVDDLDPLAFFQSGEADFLGERFFWSDPESQMIFSGLGRAAVIKSSEQGKERFDIVHQEWEQLKQHMFHFHDEKELKQAAVGPLLFGGFSFDPYEEKARHWEAFGEAHFFVPSMMLTVSKEGTFLTINEWNEVDGNVHQLIQELEQKASNFDALPVRHDGQAELVHMEELDVKEWMKAIHEATAHIRANEYEKVVLAREVLLHYKNQIELAPLLAELLKHQTTSYVFAIEQGRQAFVGATPERLVKKSGGEVFSSCLAGSIVRGQDEIEDQALGEELLHDEKNLIEHQIVVNMIEQAFEANCHHVHKPHQPSLYKTKNIQHLFTPIVGEIKSSCSLFSLIEQLHPTPALGGYPKEKAVEVIREIEPLKRGWYAAPVGWIDSQDNGEFAVAIRSGLIEEDHVRLFAGCGIVEDSLATQEYEETQVKLRPMLSALGGRPNE

SEQ ID NO: 93432 - protein, 467 aa, unidentified
  source 1..467: note = Bacillus zeae
  REGION 1..467: note = tr|A0A398B5P9|A0A398B5P9_9BACI Isochorismate synthase MenF OS=Bacillus zeae OX=1917180 GN=menF PE=3 SV=1
MVTIQETELREGILSAIRLAKETVQPVLVSEVQKIADIDPFSFFNAGREQFLGERFFWKDPDSRHIIAGLGNCRLIQHDGVRGRFTKTEKEWNRFIETAVILDEYKTSGTGPLMFGGFSFDPLKEKTGLWSKFSDSHFHVPKYMLTVAGGQAYFTSNVICTQHDDADLYEKVLQERQIILLAQKQPVLPMPALQEVIEIAPEEWKESVSELVRELKDSPLKKVVLARELRLRFSKAAEAESVLFRLLKEQQGSFIFAFESNGDCFIGATPERLVKKEGNSVFSACLAGSIGRGADSDSDEKLGRSLLEDQKNLIEHQYVVDMIREAMEETCDEVIIPATPQLMKMKYIQHLYTPVIGKNRRGTPIFSLVDRLHPTPALGGLPKKLAVEKIREMERLDRGYYAAPLGWLDHNGNGEFAVAIRSALLQGEEASLFAGCGIVADSDADSEYRETSIKFRPMLNAFGGNNL

SEQ ID NO: 93433 - protein, 472 aa, unidentified
  source 1..472: note = Bacillus zhangzhouensis
  REGION 1..472: note = tr|A0A081L6H6|A0A081L6H6_9BACI Isochorismate synthase MenF OS=Bacillus zhangzhouensis OX=1178540; GN = menF PE=3 SV=1
MVTTVQSTFRQEALATLEEANNVNHAVLISYSRRVDDLDPLAFFQSGEADFLGERFFWSDPESQMIFSGLGRAAVIKSSEQGKERFDTVHHEWEQLKQHMFHFHDEKELKQAAVGPLLFGGFSFDPYEKKARHWEAFGEAHFFVPSMMLTVSKEGTFLTINEWKQVDGNVHQLIQEVEQKASRFETLPVRTDGQAELVHMEELDVTEWMKAILEATEHIRANEYEKVVLAREVLLHYKNQIELAPLLAELLKHQTTSYVFAIEQGRQAFVGATPERLVKKSGEEVFSSCLAGSIVRGKDETEDQALGEELLHDEKNLIEHQIVVNMIEQAFEANCHHVHKPNQPSLYKTKNIQHLFTPIVGEIKSSCSLFSLIEQLHPTPALGGYPKEKAVEVIREIEPLKRGWYAAPVGWIDSQDNGEFAVAIRSGLIEEDHVRLFAGCGIVEDSLAKQEYEETQVKLRPMLSALGGRPIE

SEQ ID NO: 93434 - protein, 457 aa, Bacteriovorax sp.
  REGION 1..457: note = tr|T0DIJ1|T0DIJ1_9PROT Isochorismate synthase; OS = Bacteriovorax sp. BAL6_X OX=1201290 GN=M902_2949 PE=4; SV = 1
MRLSANNLQIDIINALIKLDCSSEDLIKGSEYSLYKFEAGFNNISSIIDHFQTFKKFYFLNKDKDTEILALGSWRDFNSLYHYEDIERLIESHEFLKICGAQRFKAEADSLEWHGLEDCSYFIPKVLIESTPQGVDINVILPNSFFADEQNKKQVLHELAITLDPNPKHTLTDYNHITKSISETSKNQWNKIVKAAVSKINRSQISKIVLSRKLKVSFKNPISSYGQFKTLKENNSHNSYNILFQFSPHQCFYSVTPETLFKLDGRKIFIDSLAGTTKRGANKQEDDALEQTLLTNTKELEEHRHVSSYIEDTLANLASDIEITKKEQILKLKYIQHIHTKYEGVLNENAKRSDLITYLHPTPAVAGLPKPLAIELISELETNSRGLYAAPIGYFSKDKTEFAVGLRCALVDKTDLHIYAGCGIVKDSSAEKEWNETTNKMKNFTEVIKAKSWTNFH

SEQ ID NO: 93435 - protein, 463 aa, unidentified
  source 1..463: note = Unknown
  REGION 1..463: note = tr|A0A3A9FY86|A0A3A9FY86_9BACT Isochorismate synthase MenF OS=bacterium 1XD42-44 OX=2320106 GN=menF; PE = 3 SV=1
MIEVQDQQVEKLLRDAIHQMPLTKETQLVSITKRVEPKDPVLFFAAAAKLNKERCFWTSTKDSFSIVGVGNVFEISANQDRFHYTEITWKKLLDDVRIYNPFQAPGTGLVSLGGLDFDPQKPRTELWADFPRAKFTVPEYMLTKNMEDVYFTINLKIRKDDHPVQLMKAIEDVERMLFQASKDPHGVPHLVNSKVIAPEQWKQTVQKAKQEIQQKQMDKIVLARELRLQFSKQVNISHILGDLIKKQSNSYVFAFEQHNSCFVGATPERLVKVDKQELLSTCLAGTAPRGKTEVEDQQMADNLLHDQKNREEHEFVVQMIKQGLNKYCTDVHIPDTPVVYPLKNLQHLYTPVTGRLKDGFTIFNVVKELHPTPALGGVPRDLSMRFIRDYERLDRGWYGAPVGWLDSNDHGEFAVAIRSALIQEDEASLFAGCGIVKDSNPEEEFEETRIKFFPMLTVLGGQA

SEQ ID NO: 93436 - protein, 429 aa, unidentified
  source 1..429: note = Unknown
  REGION 1..429: note = tr|A0A1V5JBG2|A0A1V5JBG2_9BACT Isochorismate synthase DhbC OS=bacterium ADurb.BinA028 OX=1866933; GN = dhbC PE=4 SV=1
MSTLHGPARAASGTVAPLVVRTVEIGDPGPLLALLPPAEQPGDVLSWVRRGEGLVGWGQAATFTTAGPERFADADRWWRHTAARAVVRDEVGMPSSGLVCFGSLPFADDSADRASFVVPRVSVGHKGSRWWVTTVGDVPTLAVTPAPTDDPLPPRNVAFADGALSSTAWAARVAEAVARINAGDLDKVVLARDLIVQADAPIDPRWVLRALADRYDNTWVFSVSGMVGATPELLVRRERGLVTSRVLAGTIRRTGDDAKDLSLAASLARSSKDLEEHEYAVRSVADALAPHCSSMNVPESPFVLHLPNVMHLATDVTGVATDDASSLALAASLHPSAAVGGTPTPLAVALIAELEDMDRGRYAGPVGWMDAKGDGEWGIALRSGRYVDGDPASLRIFAGCGIVAGSDPDGEVSEADAKFVPMRDALSGR

SEQ ID NO: 93437 - protein, 454 aa, unidentified
  source 1..454: note = Unknown
  REGION 1..454: note = tr|A0A1V5GWY2|A0A1V5GWY2_9BACT Isochorismate synthase EntC OS=bacterium ADurb.BinA186 OX=1866934; GN = entC PE=4 SV=1
MLSSRLSDAHTVRDAAKVLLSWLKNAPLNGSHNLSLKINVEHPSEQEFFSPEGCQRIYFKSRDCDLEWWGLGAAESLFQSSVHDQSVLSQVVKKSHFLDDDQIYFGGIKFDKDRVVDDEWKDFQYEIFILPLLLMHHSAEGFTLSLNYRSDGLPYVVWRDHAESILSSIINRKGVVEHKKYTYSDYQCPGETNYYSTIKRALLLLGSHSDYKKVVIGRRTTRSLSMPFDPVQLFFRLKRAPHAFLFMFDSGQGSTFFGASPELLYRRIGQNFETESLAGTRARSLNRDIDEQLRQELLESSKDKSEHFFVSNHIEDRLREFGISDLFTSKIEIMALPFVQHLHRRYHGRIEHGLSDDKIMTALHPTPAVCGINSLWAKQFIREHEGFDRGFFAAPIGYIGKNSAEFAVAIRSALYRASELHIYAAGGIVPGSIPEQEWEELNNKQKNILSIFDE

SEQ ID NO: 93438 - protein, 463 aa, unidentified
  source 1..463: note = Unknown
  REGION 1..463: note = tr|A0A2H6EQX0|A0A2H6EQX0_9BACT Salicylate biosynthesis isochorismate synthase OS=bacterium BMS3Abin04 OX=2005712 GN=pchA PE=4 SV=1
MKDLLKKFRLFNDSFKNRTGFNNTVSGFRSFAYRIKTINFSFLLNNFNSEDYFYWSVSDNNLSMLGIKSVFDIKISGLDRIEKTDSKILQIENNVESNWHEVGLNFPPMFLGGMKFVPNEQGNVWNDFSDSDWMLPKFLFYKNNSEYFLIINYKSSTYDDSVLENEILEITDFLTQTTNPAEQKNIQITSTIVHNGWNNKVLNALKSIHEGAIQKIVLSREVEWELSGVPNIYSLIQKLGKRYPKCYVFAFRRNNSVFFGASPEKLAKIQNGWIETDALAGSISRSPNPKEDLKLEKELLSSEKNLNEQDAVVKFITGSLSKISDNIEFDEKPIIRKLPNIQHLWTPIRAKLNKELKLFSILKNLHPTPAICGAPWLNALQSITMMEEHDRGLYAGIVGWFCLENKAEFAVAIRSALLKDKKVYGYAGCGIVEGSDPDAEYEETELKLKPIKNLFVNEKSRQS

SEQ ID NO: 93439 - protein, 434 aa, unidentified
  source 1..434: note = Unknown
  REGION 1..434: note = tr|A0A2H6EUF9|A0A2H6EUF9_9BACT Isochorismate synthase MenF OS=bacterium BMS3Abin05 OX=2005713 GN=pchA; PE = 3 SV=1
MKEPQVSKNKGIVRFEIPVTDINPLDWLAWQDQAFKTYWSTGDGQFEMAGAGTADLISGDESFQFKTLLDRIHKNLAASSTGVRYYGGTRFDGKQKAGTSWQRFGAYAFVVPQFEVVRRKDELRFACNFRNNGENGFQKIQSALQKIRFEHTEKRPKEIILIDRKDLPAKIDWVKDIKRALREFNSGKLQKVVLARKSVFRFSQNLEPLSLLKALKNANPRAFHFYFQPENKLAFLGATPERLYHRLGREIRSDAVAGTRPRGKTAQEDAHFRHELLSSDKDRREHEFVFQWVRDVLTKMCETLQFDSKATIIQQPAVQHLHRHFNGVLRESISDGDLLAGLHPTPAVGGFPTKLAMENIARNEPFDRGWYAGPVGWIGHDEAEFAVAIRSGLVDGARLSLFSGAGIVPESNPLSEWDEIESKISNFLIIMNRH

SEQ ID NO: 93440 - protein, 400 aa, unidentified
  source 1..400: note = Unknown
  REGION 1..400: note = tr|A0A2H6H8J2|A0A2H6H8J2_9BACT Salicylate biosynthesis isochorismate synthase OS=bacterium BMS3Bbin01 OX=2005724 GN=pchA PE=4 SV=1
MLFPNDVATGLTAGLSVPCAVQPIDLARSASRAGFPVFYFGRREEAVGVGVAWRSDDLLARPPSEGRLFFAFPFDGSRRAGSVVLPAVTLVKGEAGGRLHVAPGQEEMPAMLSRLEHPGETPAPAGRVTARDPESDVWAAMVERARETIGSGLLSKVVLARSVTLAFDEVRPFDVVALLRERFPDAFTYGWAENGSAFVGASPELLVERRGESIRSFPLAGSAVRGSGSIDDAKSARALLGSAKDRSEHQFVVDEIVRLLRPLTSEMSVPTRPTVVRVANIQHLGTEIRGLLARPMGVVQLAMALHPTPAVCGTPTAAALSFIRDVETLDRGWYAGGVGWTDASGDGEAAVALRCALLQNHGARVYAGAGIVRDSDAAAEVAETEAKLRALLDILQTDPL

SEQ ID NO: 93441 - protein, 440 aa, unidentified
  source 1..440: note = Unknown
  REGION 1..440: note = tr|A0A2H6HDY7|A0A2H6HDY7_9BACT Salicylate biosynthesis isochorismate synthase OS=bacterium BMS3Bbin02 OX=2005725 GN=pchA PE=4 SV=1
MLISSDDIRSLATALGGVSATVRTVVVPTSVHPLQFVRSAAHLFGRAFFFSEPTGRAFGGLGAAWRATASGPDRFSLLEEELSTAGLPPDVEAAMGFSFSEDGPKSDLWDGFGAAEACVPEIAISVSNSGKPQLRVTIAAGQSSDRVLSVLARLVEPDRLRPPEPGDYTIEAHPSTLEWQREVDDAVEAIRAGVVHKVVLSRSVVVKSEASVPPFDLVHHLGAVHRGCYIFGWQTGDAVFLGATPELLLSKRGRRIVSNPLAGSARRGPDDEADRGIGAELMASSKDRSEHAFVVDDIRDRLGPLTGDLVVPSEPSVLRTAAVQHLSTRISGTLLDGVSLYEAAATIYPTAAVGGSPRQQAQVLIDKVEQLDRGWYTGGIGWVDSDGDGTIALGLRCGLVRGSEAHVFAGNGIVAESDAETELLETRLKLRPMLNLLSAT

SEQ ID NO: 93442 - protein, 439 aa, unidentified
  source 1..439: note = Unknown
  REGION 1..439: note = tr|A0A3A9BCQ5|A0A3A9BCQ5_9BACT Isochorismate synthase OS=bacterium D16-34 OX=2320120 GN=D7W09_02045; PE = 4 SV=1
MSKIYSFTTPIEADIVDAFCTLQKGFTDQFVYYRKDKPVRYMGLGRCVALSSVDDIDCVYAGDKEEPPVYFSFNRFDATNPAAPDELFESFPQLHFLLPEIVLIENARGSFLQVNSLGPVYPGRVERFYRQALAASPRTRRTIRYTREPDSREAWEQAMAQALDAIEHDRVKKVVLSRRQKVVAASPFSSKDLLVNLIDGSAQGTVLMYRYADVFFCACTPELLVRKTGQRIESMCLAGSAPVGETAKEREAYGAQLLADEKNLEEHDYVVAFIRDVLMRNCYDVQVPSEPTLLKLPTIQHLYTPCSAELLEGTSLWDIAAQLHPTPAVAGTPVGEARMLLRQIEPYNRGFYAGACGYVDGKGDGEFSVALRSGVFDGEIGWIYAGCGIVAQSNVASEYDEVALKLQTILSAFDGEAKAVCADDSKECSCEAERGAHES

SEQ ID NO: 93443 - protein, 420 aa, unidentified
  source 1..420: note = Unknown
  REGION 1..420: note = tr|A0A2H5WB61|A0A2H5WB61_9BACT Isochorismate synthase DhbC OS=bacterium HR12 OX=2035407 GN=dhbC PE=4; SV = 1
MAHLVARARRLGPAYDLLAAYRADGVFFERGGLGLAGAGVAERIGVGGGPDRLPTLAREVETVLRHIRRDPAAPAPVAVGAIPFDDGRPAELLVPERLVQRRRPGETVALEVFAEGLAPADHERERWVGRALPHAAFEEIQLRADPEPEAYAAAVREAVRRIRAGGLRKVVLARTVVVAADRELDPKQLLWRLRAVDPDCFTFAAPELVPGTAAPVGVLVGATPELLVAKRGDRVLATPLAGSSPRFGDPGEDAASAAHLLASAKDREEHALVVEGVEAALAPLCEELHHPHEPEPLGTANVWHLATPFRGRLRPGVRSVLDLVAVLHPTPAVGGSPREAATAALAELEPIDRGWYAGPVGWVDADGDGEWAIALRCAELTGRTARVFAGAGIVADSDPASELEETERKFRALLDALRWG

SEQ ID NO: 93444 - protein, 453 aa, unidentified
  source 1..453: note = Unknown
  REGION 1..453: note = tr|A0A2H5XN56|A0A2H5XN56_9BACT Isochorismate synthase MenF OS=bacterium HR18 OX=2035413 GN=menF PE=3; SV = 1
MTRAEHPVCMPDQLPRALEDRMHRLLRRSAEDRIVRLLFQLPSIDPLHWLAAQTLPVQFYWADRDRTLTVAAVGTLEQYEGMGIEPVRALEKRLHQADVGVRFFGGGCFDVQAARAAYWLPFGPWRFWLPRFELWRQGSRCWLACNLIPARDRDAEALSGSLSWPETLPAAPLPLPLDRIDLPDYRGWAHNVQQALKAFQQGKLEKVVLARQVCFTFGEPLDSLTLMQRLEEATPGCFHFYYQPEVGKAFLGASPERLFRRAEGQVWTEAVAGTRPRGQTEADDARLAAELLESEKDRREQYYVQQSILEELRPWCQTLEVDTQLSEMTLARGRHLYTGIRGRLHAQVPTATLLEVLHPTPAVGGYPRQEALAAIRDWEPFDRGWYAGPIGWIGAETAEFAVAIRSGLVDGTRLYLYSGAGIVEGSVPELEWAEIEHKISDFVNVLGLELRRS

SEQ ID NO: 93445 - protein, 458 aa, unidentified
  source 1..458: note = Unknown
  REGION 1..458: note = tr|A0A2H5YWI3|A0A2H5YWI3_9BACT Salicylate biosynthesis isochorismate synthase OS=bacterium HR27; OX = 2035422 GN=pchA PE=4 SV=1
MSRHALRPALADLWTVAERRAAAAGQPVLLSWSDTSEPADPIALFTRSSETIRLLWYAPATGEAVVGLGGRRLPIATGAAAAGTVPERLARVWRTAAAEALQEGPLAPLVFAGWAFDPHQPGDAPDWASFGAAQLLLPRFVYRQRGALAFQALQAIVRPGETMPPSPPASRPVGRPDSQTGQPRIVTRRDLLNRGDWQRLVETALTAIDQGTLRKVVLARAVDLVADRPFDEERALRSLAERYPNCTLFAVAMGSSVFLGATPERLARVTAGTVTTVALAGSIPRGADAASDRSTVAVLRASAKDRSEHELVVQAIEQALAPLCTRLSVPDAPVVLSMANVHHLATPIVGVLRDGLGVLDVAARLHPTPAVGGTPRETALAFIRAHEPVPRGWYAGAFGWVEATGDGELVVALRSGLLRGSTARLYAGCGIVAGSDPLTEWTEAEAKLRPMLEALAGS

SEQ ID NO: 93446 - protein, 459 aa, unidentified
  source 1..459: note = Unknown
  REGION 1..459: note = tr|A0A2H5Z7B2|A0A2H5Z7B2_9BACT Salicylate biosynthesis isochorismate synthase OS=bacterium HR28; OX = 2035423 GN=pchA PE=4 SV=1
MMRRDVLASTFADLWAIAERRARALRRPVLLSWSKLIEPLDPIALFAADTSSTPRILWLIPQTGEAIVGLRCQRLPVQEVNPSPSSALARLAHSWRWHAAEAVQEGPLAPLAFAGCAFEPEDPRIDTWWEPFGNLQAFLPRLAYVQRGELSAQLVQHTVRPDDLVPLTTPDWPPSTQTSPRTRPSVVRRHDRVSRAHWAELVEAARNAIRRGELCKVVLARAVELTAERPFSFEITLRALAERYPTCTIFAVGIGETVFLGATPERLVQVENGTVTTVALAGSAPRSADPIRDRAAAAQLLTSQKDRHEHALVVEAIRTALLPLCRRLAVPDEPQLVSIANVHHLATPIAGVLADGQGALDVAARLHPTPAVGGTPREAALAFIRAYEPIPRGWYAGALGWITASGDGEFVVGLRSGIVRDTVARLYAGCGIVADSDPVAEWDESEAKLRPMLEVLGGT

SEQ ID NO: 93447 - protein, 453 aa, unidentified
  source 1..453: note = Unknown
  REGION 1..453: note = tr|A0A2H5ZEE1|A0A2H5ZEE1_9BACT Salicylate biosynthesis isochorismate synthase OS=bacterium HR29; OX = 2035424 GN=pchA PE=4 SV=1
MTFVRPVAEPAPRLLAEARTRAAALASAAEGKAFAVAALPIRRPADTLEAFREVREGVRLAFLQPERGFSIVGIGIAAAWPLNGPDPLSEAAGLLRSMPPAAVAGDAPPRELPIVFAGVAFCPGDRAPHWGPFGNGLLVVPRVLLLVEPAGAWRVETELVGTEGRAIPARLPQPPAAGPFTDRAATQAEWTAAVLRALDRIARGEATKVVVAREAYLPEHRSADEALAVLVDRFPTCTVFAVDLGGPCFLGATPERLASVSQGTFELMALAGTAPRGADSAEDDAIAARLAADRKEREEHAVVVRALREDVAPLVSELEVAPEPEVVRLPNLQHLRTLLRGRLRDGCSLFDLAARLHPTPAVGGMPREAAARIIAEVETFDRGWYAGPLGWADARGDGELVVALRSALLTPGQPARLFAGCGIVARSDPEREFSESELKLRAIRSALVREEGS

SEQ ID NO: 93448 - protein, 320 aa, unidentified
  source 1..320: note = Unknown
  REGION 1..320: note = tr|A0A2H5ZRD5|A0A2H5ZRD5_9BACT Salicylate biosynthesis isochorismate synthase OS=bacterium HR31; OX = 2035426 GN=pchA PE=4 SV=1
MLRVSVRGAEYVALSCLVTPEGGQEQVDRTIQALESVREVPAGTSGRGEVVRAVPGEQDWKTQVLDAEAACRVGELEKVVLARCVEVATSVTPDGVLQVLSERYPTCTVFAVAREGAVFLGATPETLVRVKRGRVWTQALAGTAPRGTDPDEDAVLQRQLASSSKEAREHELVVAHLREALSSVCSRVVQGPREVVTLPNVHHLRTRFSGRLVADSTVLEVAGRLHPTPAVAGLPVGRAREWIRTREPVPRGWYTGVVGWVDASGDGELAVAIRCGLLRGGRAWLFSGCGVVAGADPEREYRESQLKLRPVMEAFGVREP

SEQ ID NO: 93449 - protein, 448 aa, unidentified
  source 1..448: note = Unknown
  REGION 1..448: note = tr|A0A2H5ZVX1|A0A2H5ZVX1_9BACT Salicylate biosynthesis isochorismate synthase OS=bacterium HR32; OX = 2035427 GN=pchA PE=4 SV=1
MPTLGLLDAQLVHRFRSLACAAAARATGEPVLVWASAGAEIAPYSLPRAPGWLWRSPRTRTQATASGEAWASQGSVEATERAWRALLARSVSAGPVGPLAFCGVAFDATAAPAGVWAGFPASIVSVPRVLWLRVRGRPYVALACVAGATDLLEEVERTLAWAERWPADEADATPVGARVVAERPSADAWKSCVAHAEACCRAGPLQKVVLARSVELEGGSGPAEVVRRLQARYPTCTVFANARAGATFLGATPERLAFVRGGRVVTEALAGTAPRGRTSEEDDLLRRQLEASPKQRWEHELVADHVRAVLERRCVRTWEGRREVLALRNVQHLRTRFAGRLSPPADAVTAALALHPTPAVAGSPVDLAQRWLREHEPLDRGWYAGVVGWVSAQAAELVVAIRSALITPGRAWAFAGCGIVAGSDPEAEYAESQVKLLPLLEAMGAEGL

SEQ ID NO: 93450 - protein, 478 aa, unidentified
  source 1..478: note = Unknown
  REGION 1..478: note = tr|A0A2H6B5V6|A0A2H6B5V6_9BACT Salicylate biosynthesis isochorismate synthase OS=bacterium HR41; OX = 2035436 GN=pchA PE=4 SV=1
MAGSDRSGVRSEAHHGPFARDLVTLLDSDAARRARTRGGLVCAVRELPAAPDPALAVARLRQPGERWFAFEVPDRAGFAVAGTGVVRRVRSVGPGRFAAAAGRWREAVADAAVAHGDGGDALPLAVPVAVGGFAFADSGPTTPQWDGFGALDFVFPEVAIVREGGRSWLVLQVASDAAVVRARADAVARLLDARLSAPLLDPDPLSRPRITSVLAPEHFEEAVRRATALLRAGEAEKVVLARAVRVDTRSAIDPLALYCALREVFPACYTYLVGAADASFVGATPELLVRRDGLRVQTVALAGTARRSADPAVDRHLGEQLARDPKQRREHEIVARRLARNLEPLAVWVTVAAEPQLVRVHNVQHLATPIRAQLREPVTLFELAERLHPTPAIGGEPRAAAARLVPALEGIDRGWYAGGIGWIDRDGGGELAVALRCALVRGTSAELYAGCGIVAESDPAAELAETEAKLAAVLPLFG

SEQ ID NO: 93451 - protein, 397 aa, unidentified
  source 1..397: note = Unknown
  REGION 1..397: note = tr|A0A4S1I7P0|A0A4S1I7P0_9BACT Isochorismate synthase OS=bacterium M00.F.Ca.ET.141.01.1.1 OX=2563898; GN = EN784_08785 PE=4 SV=1
MNDSLIQGTWPEAAPAPQEGTDDASLFLLQHAGQHVHARGCRATLPAGALATLAERVSAFFAQQRGGPGLLVGAVPFEPRADDALYQPERLLPALPLPPQAAPALEGALQAEPTPEAYAASVAAAVQVLRAPGLDLQKVVLARSLLARTRQSLSPEVLLARLGADPSVATYAVPLPVAPGQAPAWLVGATPELLLRKRGAELLSHPLAGSARRSIDAAEDERAAQALLASTKDHDEHRHVVEAIVDGLAPYCSHIDAQPRPALHATASMWHLGTRIHATLKDPQTSAAALLAQLHPTPAVCGTPRLAALQRIGELEPVPRGFYGGAVGWLDAQGDGDWYVAIRCARLQGTQLRLFAGAGIVAESQPEAEVAETAAKFAALLNALGVHASAPTNEPAA

SEQ ID NO: 93452 - protein, 397 aa, unidentified; identical to SEQ ID NO: 93451
  source 1..397: note = Unknown
  REGION 1..397: note = tr|A0A4S0Z6U2|A0A4S0Z6U2_9BACT Isochorismate synthase OS=bacterium M00.F.Ca.ET.163.01.1.1 OX=2563906; GN = EN806_03235 PE=4 SV=1

SEQ ID NO: 93453 - protein, 391 aa, unidentified
  source 1..391: note = Unknown
  REGION 1..391: note = tr|A0A4S1HJN6|A0A4S1HJN6_9BACT Isochorismate synthase OS=bacterium M00.F.Ca.ET.168.01.1.1 OX=2563907; GN = EN811_02575 PE=4 SV=1
MKTGALRTNDVESDEIADFNRDFLFTSGTGQLRAKGIRERITLPARGGEDTGSPLQQAIKAAFERARRAGQDNPIAIGAIPFDVSEPSCLYIPNNHEWSPRETAPVVADSAMPALVGQNSLPDETGFKRAVEHAIVNFRHSDVRKAVLSVMRELTFASEVNVERLLASLAKQNREGYQFRIPLPDGGDLIGVSPELLIRKQGENIISNPLAGSAKRMVDPAADKANAERLSASEKDHYEHSLVIEDIRSLLSPVCAELDVPEKPSLINTAALWHLSTRIEGRLADPETNALQLACLLHPTPAVCGFPTERAHRLIRFVEPFERGLFTGMVGWTDFEGNGEWVVTIRCGTVQRKTVRLFAGAGIVEASEPESEWAEVQTKLKTMLNACGLSA

SEQ ID NO: 93454 - protein, 397 aa, unidentified; identical to SEQ ID NO: 93451
  source 1..397: note = Unknown
  REGION 1..397: note = tr|A0A4S0RE23|A0A4S0RE23_9BACT Isochorismate synthase OS=bacterium M00.F.Ca.ET.177.01.1.1 OX=2563908; GN = EN820_03235 PE=4 SV=1

SEQ ID NO: 93455 - protein, 391 aa, unidentified; identical to SEQ ID NO: 93453
  source 1..391: note = Unknown
  REGION 1..391: note = tr|A0A4S0N2E5|A0A4S0N2E5_9BACT Isochorismate synthase OS=bacterium M00.F.Ca.ET.179.01.1.1 OX=2563909; GN = EN822_02575 PE=4 SV=1

SEQ ID NO: 93456 - protein, 450 aa, unidentified
  source 1..450: note = Unknown
  REGION 1..450: note = tr|A0A4S0LR44|A0A4S0LR44_9BACT Isochorismate synthase OS=bacterium M00.F.Ca.ET.180.01.1.1 OX=2563910; GN = EN823_06905 PE=4 SV=1
MTLDVKESEIVEAVYESNQTWVSVEAKLDYELEPTLLFHLTEDCAGDRFYFKKNDNETSFFGYHAITRFKNDFENKQSIFREWEKYKNDIELIHPNSEKHHLKICGGFQFSTHKSGDEWREFGINHFVLPEVLVTMEAGQSFITYTVEADKFEMDAFLAIIDKLTQMDVQPNDEIGEIKRIDDIYKDEWRDLVKDTIDILDENKKIVLARKRLIMFDKNINIPYILNRAMQGEHNSYLFVLESKDSVFFSQTPEQLMEVKDDVLSTKAVAGTIKRTHRDDIDKANIDAFLNDKKNLNEHHFVVKSILNDIKPYVEQIAFNKKPQILTNDHLYHLYTKIEGRLIQNSYIGLLDNLHPTPALGGYPKEEAISYIENNEFGTRGLYGAPVGYIDMYDNCEFIVAIRSMLIKKNQATLFAGCGIVQNSDADSEVEETAVKFNPMMKALGVEKYE

SEQ ID NO: 93457 - protein, 391 aa, unidentified; identical to SEQ ID NO: 93453
  source 1..391: note = Unknown
  REGION 1..391: note = tr|A0A4S0GT29|A0A4S0GT29_9BACT Isochorismate synthase OS=bacterium M00.F.Ca.ET.194.01.1.1 OX=2563912; GN = EN837_02575 PE=4 SV=1

SEQ ID NO: 93458 - protein, 397 aa, unidentified; identical to SEQ ID NO: 93451
  source 1..397: note = Unknown
  REGION 1..397: note = tr|A0A4S0FN66|A0A4S0FN66_9BACT Isochorismate synthase OS=bacterium M00.F.Ca.ET.199.01.1.1 OX=2563913; GN = EN842_08050 PE=4 SV=1

SEQ ID NO: 93459 - protein, 450 aa, unidentified; identical to SEQ ID NO: 93456
  source 1..450: note = Unknown
  REGION 1..450: note = tr|A0A4R9SGD1|A0A4R9SGD1_9BACT Isochorismate synthase OS=bacterium M00.F.Ca.ET.229.01.1.1 OX=2563919; GN = EN872_06910 PE=4 SV=1

SEQ ID NO: 93460 - protein, 437 aa, unidentified
  source 1..437: note = Unknown
  REGION 1..437: note = tr|A0A3N9MX36|A0A3N9MX36_9BACT Isochorismate synthase OS=bacterium OX=1869227 GN=EH220_06145 PE=4 SV=1
MFSSPANPLTNLTLKANPILRARVGNLKVSDPWLLLDTAPHVIYWQSRNSDELWCGVGESYGDPLLSTALRVQESIEGVEDLPFKPRCFGMTRFHPYGPAASDWEGFPQRGYWIPRLQIRYRGTERDVIIIEDKHHISDPEIDMLPVFDPMFEKTSPNSLVEERSNLSRDDWRTAVRTIQSRIESGILEKTVLARQLELTAEKRISAAAVMQRLAQSSPESYLFAYRHPRSGIFFGASPERLFHLKDQTVSVDSLAGTRPRNTGAQTDQELAHELVLSDKDKKEQRFVTDYVLDKLTPLCSELKVSDLQVKNLATVQHLYNSITGNLLSPTDHYTAAETILERLHPTPAICGVPTDAARQLIEELEPNPRGLYAGAIGMADNRSAEFAVAIRSGLLRDNRAILFAGAGIVAESVADEEFTECDWKFAALRQALFSEA

SEQ ID NO: 93461 - protein, 382 aa, unidentified
  source 1..382: note = Bacteroidaceae bacterium
  REGION 1..382: note = tr|A0A5C6HRC1|A0A5C6HRC1_9BACT Isochorismate synthase OS=Bacteroidaceae bacterium HV4-6-C5C OX=2600309; GN = FQ707_00160 PE=4 SV=1
MTESKKDLSIINNLISRKQPFAFYRLPEQEKLCFLTQTTGEAEAIFNVESIHNKPGFILAPFRIKKGSPAWRIRPDYIDTNFPLETGKKSNSTTSTAPNGTEERKIDDNSRTGGNEISPSANVGDFEQYASCFRSFIEPLRKGIYDKLVLSRRVVYPGYSGFSPEHALYEACRRYVHSYVYLCYTPQTGVWLGSTPEMLLSGEADRWNTVALAGTMSLENGQLPEEWSNKNKEEQQYVADYIRKQLRSVGITPEEHGPYPSYAGALSHLKTDFHFHADTARLGELLKVLHPTPAVCGLPKEKAYRFIKENEGYDRNYYSGFVGMLNPLGKTDLYVNLRCLNYKVNELSLYAGSGLLSASELEDEWQETEKKLQTMKRLLFSE

SEQ ID NO: 93462 - protein, 272 aa, unidentified
  source 1..272: note = Bacteroidales bacterium
  REGION 1..272: note = tr|A0A180FRE3|A0A180FRE3_9BACT Isochorismate synthase entC OS=Bacteroidales bacterium Barb7 OX=1633203; GN = entC PE=4 SV=1
MTTGYPKRFRRFITPLREGCMKKLVLTRRVEVERTADFSPATAFLMACQKYPEAYVYLFHTPDTGTWLGCTPEIFLSGGNGNWLAAAIAGTQPLVADGLLPQVWSEKNYAEQQLVADFIQSQLTTAGLKPSVTGPYAIHAASDIAHLKTDFRFSVPDDNHTGDLLKLLYPSPSICGLPKEEAFRFINEREGYDRRYYSGFLGRLDPKGKSELYINIRCMEILPDFLELYVGSGLLPNSAASEEWRETEAKLRTMRSLIYKSYVPGEDKTSEQ

SEQ ID NO: 93463 - protein, 365 aa, Bacteroides acidifaciens
  REGION 1..365: note = tr|A0A4V6RCS4|A0A4V6RCS4_9BACE Isochorismate synthase OS=Bacteroides acidifaciens OX=85831; GN = E5356_06290 PE=4 SV=1
MIDEEISNLTAIDTFIRQKQPFAVYRIPGEKVPRLLQTGGTVRLIYDLKDLNGQRGFVIAPFRVSGTCPIVLIQPDQSGQPLPMDVDTDGEQEKTGQTQMRETYLNTCTDKYAACFHTFINALRDETFDKLVLSRELVIGQMPDFSPSSVFRAACKRYIHSYIYLCYTPQTGIWLGSTPEIILSGEKDGWNTVALAGTQPLQDGKLPQAWDEKNRKEQDYVASYIRRQLLSLGIRSTENGPYPAYAGALSHLKTDFHFSLKDNKDLGNLLKVLHPTPAVCGLPKEEAYQFILENEGYDRRYYSGFIGWLDPDGRTDLYVNLRCMHIEDEQLTLYAGGGLLASSELDDEWLETEKKLQTMKRLIAY

SEQ ID NO: 93464 - protein, 364 aa, Bacteroides caccae
  REGION 1..364: note = tr|A0A174PLW2|A0A174PLW2_9BACE Isochorismate synthases OS=Bacteroides caccae OX=47678 GN=entC PE=4 SV=1
MTTIDAFIERKQPFAVYRIPGEKIPCLVTQEEGAVRLIYDLQELNGQRGFVIAPFRPNETCPILLIQSNGPGQPLLLADDADAVPRDIPSTDYPSCSEEYAECFRTFISALRDKTFEKLVLSRKLTIGKPTAFSPSLAFRAACQRYIHSYIYLCYTPQTGIWLGSTPEIILSGEKDDWHTVALAGTQPLQDGKLPQVWDEKNRKEQEYVSSYIRGQLLSLGIHSTENGPYPAYAGALSHLKTDFRFSLQDNKGLGDLLKVLHPTPAVCGLPKDTAYRFILENEGYDRRYYSGFIGWLDPDGRTDLYVNLRCMHIEEEQLTLYAGGGLLASSELNDEWLETEKKLQTMRRIIVPASLHDPQPITS

SEQ ID NO: 93465 - protein, 371 aa, unidentified
  source 1..371: note = Bacteroides caecimuri
  REGION 1..371: note = tr|A0A4S2CGF3|A0A4S2CGF3_9BACE Isochorismate synthase OS=Bacteroides caecimuri OX=2516958; GN = E5353_16695 PE=4 SV=1
MIDEEISNLTTIDAFIQRKQPFAVYRIPGEKVPRLLTQAEGAVRLIYDLKELNGQRGFVIAPFQVSESCPVVLIQPDQWGQPLSVDDDTEEDREIALRLQGQESFLTSSTEEYAACFHTFINALRDRTFDKLVLSRHLTVDKVADFSPLSIFRAACKRYIHSYIYLCYTPQTGIWLGSTPEIILSGEEDEWHTVALAGTQPLQDGRLPQVWDEKNRKEQDYVASYIRRQLLSLDIHATENGPYPAYAGALSHLKTDFRFSLKDNKGLGDLLKVLHPTPAVCGLPKEEAYQFILQNEGYDRRYYSGFIGWLDPEGRTDIYVNLRCMHIEDKQLTLYAGGGLLASSELNDEWLETEKKLQTIKRLIAVPPLKS

SEQ ID NO: 93466 - protein, 439 aa, unidentified; identical to SEQ ID NO: 93442
  source 1..439: note = Bacteroides caecimuris
  REGION 1..439: note = tr|A0A3A9BGD9|A0A3A9BGD9_9BACE Isochorismate synthase OS=Bacteroides caecimuris OX=1796613; GN = D7W50_07215 PE=4 SV=1

SEQ ID NO: 93467 - protein, 373 aa, Bacteroides coprocola
  REGION 1..373: note = tr|A0A412GKE9|A0A412GKE9_9BACE Isochorismate synthase OS=Bacteroides coprocola OX=310298 GN=DWY20_09340; PE = 4 SV=1
MNLPGTTIHKLIDNLTRSPFSFALYRLPWTDEPILVLQEEEDVEVLNSPAALNGKRGFVMTPFHQTEEYPAVLIRPDKVAHEWENISQSLEAFASSISFEFSSSFNSKEKRSTNAQEAKEKYEQVFSRFISSLEDNTFKKLVLSRNYTQALEGDFSPLTAFIRACNNYPRMMISLCHTPQTGTWIGSTPEIILSGQDTEWHTVALAGTMPMQGEIMPTEWSEKNQNEQAFVSEYIRQTVKRFGNKLKEKGPYTARAGQLVHLKTDFHFELKDTAHLGDIVQELHPTPAVCGLPKEEAYHFILNNEGYNRAYYTGIIGWLDPQGETTLYVNLRCMNITDKTATFYAGGGILPSSTVETEWEETQQKMNTMRNIL

SEQ ID NO: 93468 - protein, 360 aa, Bacteroides coprophilus
  REGION 1..360: note = tr|A0A413SZ28|A0A413SZ28_9BACE Isochorismate synthase OS=Bacteroides coprophilus OX=387090; GN = DW921_09290 PE=4 SV=1
MNKPATALYRLPYTDSPILIAQLQGEPQILTSLQELNGRKGFVIAPFRLTSSTPAVLIRPDLIAKGWDQIHEVLQCHPELKPGIISCGNESVESSEPILKKAYEEAFGRFITPLRQGQFRKLVLSRSATYPLPQDFSVMDAFIRACKEYPRMMISLHSTPFTGTWMGSTPEIILSGNGRQWHTVALAGTVPLIEGEENVTWSEKNRKEQALVTEYIREVISRFGTQSEEQGPYTARAGRLLHLKTDFKFQIDNPENIGNLLEALYPTPAVCGLPKQEAYDFIIANEGYDRSYYAGVIGWTDPDGDTNLFVNLRCMQLTPHSAVLYAGGGLLPSSDPELEWNETLHKMATIKNTLTPNSRK

SEQ ID NO: 93469 - protein, 380 aa, Bacteroides dorei
  REGION 1..380: note = tr|A0A5C6L5U8|A0A5C6L5U8_9BACE Isochorismate synthase OS=Bacteroides dorei OX=357276 GN=FSA04_09775; PE = 4 SV=1
MNLPDIHTQKLLDCLTHSRLGFALYRLPWTDECYLVLQTSGDVEQLADIQELNGKKGFVMAPFRISEEHPLVLIRPDVTAYDWSEISEALSSLECADALLTCKSRQSELSPFVSEETDKEQYTRAFGRFITPLQEKLFQKLVLSRSSARHIGDDFSPLGAFVRACNNYPRMMIYLCHTPASGTWLGSTPEILLSGHGKEWHTVALAGTMPMQNEVMPTDWDKKNREEQGYVADYIRRIAKRFGNKMTEKGPYTARAGQLVHLKTDFYFLLKNTDHIGDLLQELHPTPAVCGLPKEEAFRFIPDNEGYDRSYYSGFTGWLDTEGHTDIYVNLRCMEIKPGEAILYAGGGILASSEVESEWMETGDKMNTMRSILHPDFINK

SEQ ID NO: 93470 - protein, 376 aa, Bacteroides eggerthii
  REGION 1..376: note = tr|A0A414MG90|A0A414MG90_9BACE Isochorismate synthase OS=Bacteroides eggerthii OX=28111 GN=DW701_04620; PE = 4 SV=1
MIDKEISNLTAIDTLIRQEQPFAVYRIPGEAAPHLLMQATGNVRLLHDLEELDGERGFVIAPFRVSEESPIVLIQPEEPEHFLLPDEYSEEEQEAFRLFQEQETFSETYTEGYETCFRTFIEALRSKRFDKLVLSRKSVIGQFPDFSPSAVFHAACKHYIHSYVYLCYTPRTGVWMGSTPEIILSGEKDEWSTVALAGTLPLQNGNLPQEWGEKNRQEQEYVVSYIRRQLLSLDIHPAESGPYPAYAGALSHLKTSFHFTLRDNRKLGSLLKVLHPTPAVCGLPKEEAYRFILENEGYDRRYYSGFIGWLDPSGKTDLYVNLRCMHIENGQLSFYAGGGLLASSELNDEWLETEKKLQTMKRLLRIPSHDSLTTNH

SEQ ID NO: 93471 - protein, 367 aa, Bacteroides faecichinchillae
  REGION 1..367: note = tr|A0A1M5A626|A0A1M5A626_9BACE Isochorismate synthase OS=Bacteroides faecichinchillae OX=871325; GN = E5981_04855 PE=4 SV=1
MTDEEIRNLTTIDAFIQRKQPFAIYRIPGEEYPRFLTQTTGEVCLIYDVKDLDRQRGFVIAPFHVSEACPIVLIQSEQPGQPLPIEEGIIPDDFSVFSSEEESFIASCSEEYAACFHTFIEALSNHTFDKLVLSRSLTIQKVSEFSPLAAFRIACRRYVHSYIYLCYTPQTGIWLGSTPEILLSGEKKEWNTVALAGTQPLQGGKLPQIWDDKNRKEQEYVTSYIRHQLLSLGIRATENGPYPAYAGALSHLKTDFQFSLKNSETLGELLNVLHPTPAVCGLPKEEAYRFILDNEGYDRSYYSGFIGWLDPDGRTDLYVNLRCMQVGKETLTFYAGGGLLASSELNDEWQETEKKLQTMRRLTPALS

SEQ ID NO: 93472 - protein, 370 aa, Bacteroides faecis
  REGION 1..370: note = tr|A0A3E5G6A5|A0A3E5G6A5_9BACE Isochorismate synthase OS=Bacteroides faecis OX=674529 GN=DXB21_18530; PE = 4 SV=1
MTDEKKNLTTIDALIQRKQPFAVYRVPGERFPRLLTEDTGAVRLIYDLKELNGQRGFVIAPFCVEKSCPIVLIQSDKTGQPLPVETDTDEEEELNLQTYPKESFLTLCSEKYATCFHTFIEALRDATFDKLVLSRSLTIGKHPEFSPSAVFRAACQRYIHSYIYLCYTPQTGIWLGSTPEIILSGEKNEWNTVALAGTQPLLDGKLPQEWDDKNRQEQDYVASYIRRQLLSLGIHSTEKGPYPAYAGALSHLKTDFHFSLKDNRNLGDLLKVLHPTPAVCGLPKEEAYRFILENEGYDRKYYSGFIGWLDPEGWTDLYVNLRCMHIEDEQLTLYAGGGLLSSSELNDEWQETEKKLQTMRRILVSAPHND

SEQ ID NO: 93473 - protein, 373 aa, Bacteroides finegoldii
  REGION 1..373: note = tr|C9L257|C9L257_9BACE Isochorismate synthase; OS = Bacteroides finegoldii DSM 17565 OX=483215; GN = BACFIN_08687 PE=4 SV=1
MIDEEISNLTVIDALIRQKRPFVVYRIPGEKLPRLLTQAEEEIRLIYDLQELNGQKGFVIAPFRVSEMCPVVLIQSDGWGQSLSLDDDTEEEYEASLQIQEQENFQTSYTKEYADCFQAFINALRDGTFDKLVLSRRITMDKGADFSLSSVFRAACKRYIHSYIYLCYTPQTGIWLGSTPEIILSGEKDEWNTVALAGTQPLQDGKLPQVWDEKNRKEQDYVTAYIRSRLLSLGIHSTESGPYPAYAGALSHLKTDFHFSLRDNNGLGDLLKVLHPTPAVCGLPKEEAYRFILENEGYDRRYYSGFIGWLDPNGRTDLYVNLRCMHIEDERLTLYAGGGLLASSELNDEWLETEKKLQTMKRLITSTSIIANY

SEQ ID NO: 93474 - protein, 369 aa, Bacteroides fragilis
  REGION 1..369: note = tr|A0A4P8LD30|A0A4P8LD30_BACFG Isochorismate synthase OS=Bacteroides fragilis OX=817 GN=IB64_010665; PE = 4 SV=1
MTSEETNNCEIIDELIRQGRSFAMYRNPGEEEPHFLMQTYGEVRLVREMEELNGQTGFVIAPFRVTPQCPIILIQPDCQEIPSCAGSPRRSVQPVCTEVCSLSAQNERPVRAKEAYAACFDIFIRALRAHTFDKLVLSRKVTVKKEPGFSPASAFYKACRRYIYSYVYLCYTPQTGVWMGSTPEIILSGEKGEWNTVALAGTQSLQNGELPQHWDEKNREEQEYVAAYIRNQLRSLGISPVEKGPYPAFAGALSHLKTDFRFSLNDSRKLGDLLKLLHPTPAVCGLPKEEAYRFILDNEGYDRSYYSGFIGWLKPEGKTDLYVNLRCMNVKEDTLTLYAGGGLLASSELDDEFQETEKKMQTMKNLNSL

SEQ ID NO: 93475 - protein, 366 aa, unidentified
  source 1..366: note = Bacteroides heparinolyticus
  REGION 1..366: note = tr|A0A3P2ACM5|A0A3P2ACM5_9BACE Isochorismate synthase OS=Bacteroides heparinolyticus OX=28113; GN = EII33_06150 PE=4 SV=1
MTDKDTSKLKTIDALIEREEPFAVFRLPEEKVPRLLTLEGGTVRLIYDLKDLNGEKGFVIAPFRVSETCPVVLIQPGRQEPLPDEKTREGKERALQMQERFQSSPTEEYTTCFQSFIHALCNRTFDKLVLSRRFTIDRTPEFSPSSAFQAACRQYIHSYIYLCYTPQTGMWLGSTPEIILSGKSDQWSTVALAGTQPLRNGKLPQTWDEKNKKEQEYVTSYIRQQLRSLDIRSTENGPYPAYAGALSHLKTDFGFSLKDNKELGNLLKVLHPTPAVCGLPKEEAYRFILENEGYDRRYYSGFIGWLDPDGKTDLYVNLRCMHIEDKQLTLYAGGGLLASSELNDEWLETEKKMQTMKRLTAMPLNS

SEQ ID NO: 93476 - protein, 373 aa, Bacteroides nordii
  REGION 1..373: note = tr|A0A413VBF1|A0A413VBF1_9BACE Isochorismate synthase OS=Bacteroides nordii OX=291645 GN=DW888_18510; PE = 4 SV=1
MINTGEQEAYILVDRFIETGMPFAMYRIPGEKVIHLMVQLNSEVSLFNDIEELNGRSGFVIAPFRIGKDTPIVLLRPDEVCEIEFDSTKECSDDIKPDYYSPVAERAPKSVHYAPCTDKYAGCFGIFIKALRQKQFDKLVLSRDQKLDVPSKFSPAAAFHEACRRYLYSYVYLCYTPQTGVWLGSTPEIILAGEKNEWSTVALAGTQSLQNGKLPQEWDDKNREEQEYVASYIRSQLLSFNIHPEENGPYPAFAGALSHLKTDFHFSLPDSNKLGNLLNLLHPTPAVCGLPKEEAYRFIQDNEKYDRRYYSGFIGTLNPSGKTDLYVNLRCMNISSEQLTLYAGGGLLASSELEDEWLETEKKMQTMLNLIDS

SEQ ID NO: 93477 - protein, 371 aa, Bacteroides ovatus
  REGION 1..371: note = tr|A0A3D2LQ42|A0A3D2LQ42_BACOV Isochorismate synthase OS=Bacteroides ovatus OX=28116 GN=DHW41_02065; PE = 4 SV=1
MTDEEISNLTTIDAFIQRKQPFAVYRIPGEKVPRLLTQAEGAVCLIYDLKELNGQRGFVIAPFQVSETCPVVLIQPDQWGQPLPIDNDTAEEREVALRMQGQESFLTSSTEEYASCFHTFINALRDNTFDKLVLSRHLTIDKVSGFSPLSIFRAACRRYIHSYIYLCYTPQTGIWLGSTPEIILSGEKDEWNTVALAGTQPLQDGKLPQIWDEKNRKEQAYVASYIRRQLLSLGIHSTENGPYPAYAGALSHLKTDFQFSLKDNKGLGDLLKVLHPTPAVCGLPKEEAYRFILQNEGYDRRYYSGFIGWLDPEGRTDIYVNLRCMHIEDEQLTLYAGGGLLASSELNDEWLETEKKLQTIKRLIATPPLKS

SEQ ID NO: 93478 - protein, 377 aa, Bacteroides plebeius
  REGION 1..377: note = tr|B5CZ33|B5CZ33_BACPM Isochorismate synthase; OS = Bacteroides plebeius (strain DSM 17135 / JCM 12973 / M2) OX=484018 GN=BACPLE_01990 PE=4 SV=1
MKTPETIYHHLIDSFTHSNVSFALYRLPWTDEPILIMQEEGQPECISSLNELNQKKGFLLSPFHLTSFRPATLIRPDIQAHDWGEIKSVLQEWITRHPQYTDSHATAQESVPESYTTSEKEEKDLYTETFSRFIMPLKEKQFRKLVLSRSTTQIINEQFSPLSAFIKACNSYPRMMISLCHTPSTGTWIGSTPEIILSGHERNWHTVALAGTMPMQGEIMPTEWSKKNKEEQAFVGEYIRKAIKKFGSKLTEKGPYTARAGQLVHLKTDFHFCLKDTSHLGDVLQELHPTPAVCGLPKEEAYQFILDTEPHDRLFYSGIIGWIDPEGDTTLYVNLRCMHIENKKATLYAGGGILPDSTADAEWEETQQKMNTMRNIL

SEQ ID NO: 93479 - protein, 363 aa, Bacteroides pyogenes
  REGION 1..363: note = tr|A0A5D3ERV5|A0A5D3ERV5_9BACE Isochorismate synthase OS=Bacteroides pyogenes OX=310300 GN=FNJ61_04640; PE = 4 SV=1
MIVEEKELSVRIEALVGEKRPFACYRLPGEENIRLLQGNIHTLRLLSGFDELNGKRGFVMAPFEVNGNFPLVLMECEQEPETVYTNWQDGGRLTGYDGDENGCKISCTKEYEACFRLFMEKLGEGVFDKLVLSRNQTVERTPGFSPVGAFRAACVRYKHSYVYLCYTPHTGLWLGSTPEILLSGERNEWHTVALAGTLPLQNGGLPHAWSEKNRKEQEYVSAYIRKQLHSLGIHAAEEGPYPVYAGALSHLKTDFRFSLHDRIRPGDLLALLHPTPAVCGLPKERAHAFILENEGYDRSYYSGFIGWMDPRGRTDLYVNLRCMHIEEENLVLYAGGGLIASSELNDEWMETEKKMQTMKRLTQ

SEQ ID NO: 93480 - protein, 373 aa, Bacteroides salyersiae
  REGION 1..373: note = tr|A0A4Q5FUA0|A0A4Q5FUA0_9BACE Isochorismate synthase OS=Bacteroides salyersiae OX=291644; GN = EAJ08_04520 PE=4 SV=1
MDTLEQDICAGIDRFIKLQIPFAIYRIPGENVVHFVSKDPGDSCVLLYDIEELNGQAGFVIAPFNVGPTTPIVLLRPEREMVVDFDPALKCPGGIQPDVYRQMLNNQVVSLQDGSSTEGYAGRFDVFMDALKKKEFNKLVLSRSQKVNVPLLFSPATAFYEACRRYIYSYVYFCYTPHTGAWLGSTPEIILSGERNKWNTVALAGTQSLQNGELPREWDDKNREEQEYVASYIRSQLLSLGIQPAEFGPYPAFAGALSHLKTDFHFSLPDNDSLGDLLKLLHPTPAVCGLPKEKAYQFILDHEDHERRYYSGFIGMLNPDGKTDLYVNLRCMNITSEVLTLYAGGGLLASSELEDEWQETEKKMRTMKNLIMC

SEQ ID NO: 93481 - protein, 380 aa, Bacteroides sartorii
  REGION 1..380: note = tr|A0A4S2FUV4|A0A4S2FUV4_9BACE Isochorismate synthase OS=Bacteroides sartorii OX=671267 GN=E5339_02215; PE = 4 SV=1
MNLPDIHTQNLLDCLTHSRLGFALYRLPWTDECYLVLQTSGDVEQLADIQELNEKKGFVMAPFRISEEHPLVLIRPDVTAYDWSEISEALSSLECADALLTCKSRQSELSPFVSEETDKEQYTRAFGRFITSLQEKQFQKLVLSRSSARHIGDDFSPLGAFVRACNNYPRMMIYLCHTPASGTWLGSTPEILLSGHGKEWHTVALAGTMPMQDEVMPTDWDKKNQEEQGYVADYIRRIAKKFGNKMTEKGPYTARAGQLVHLKTDFYFLLKNTDHIGDLLQELHPTPAVCGLPKEEAFRFIPDNEGYDRSYYSGFTGWLDTEGHTDIYVNLRCMEIKLGEAILYAGGGILASSEVESEWMETGDKMNTMRSILHPDFISK

SEQ ID NO: 93482 - protein, 370 aa, Bacteroides sp.
  REGION 1..370: note = tr|A0A372URR4|A0A372URR4_9BACE Isochorismate synthase OS=Bacteroides sp. AM23-12 OX=2292942; GN = DW640_12335 PE=4 SV=1
MIDEKSNLTTIDALILRKQPFAVYRVPGEKYPRLLTEDVGAVRLIYDLKELNGQRGFVIAPFRVDKSCPIVLIQSDRTGRPLPMEIVADEEQVLQSYPEESFHTLCTGKYATCFHTFIEALRDATFDKLVLSRSLTIRKNPEFSPSAVFRAACQRYIHSYIYLCYTPQTGVWLGSTPEIILSGEKNEWNTVALAGTQPLQNGKLPQVWDDKNRQEQDYVASYIRRQLLSLGIRSTESGPYPAYAGALSHLKTDFHFSLKDNKNLGDLLKVLHPTPAVCGLPKEEAYRFILENEGYDRKYYSGFIGWLDPEGRTDLYVNLRCMHIEDEQLTLYAGGGLLASSELNDEWQETEKKLQTMRRILVSAPIMMNH

SEQ ID NO: 93483 - protein, 368 aa, Bacteroides stercoris
  REGION 1..368: note = tr|A0A4V1YR69|A0A4V1YR69_BACSE Isochorismate synthase OS=Bacteroides stercoris OX=46506 GN=EAJ09_02245; PE = 4 SV=1
MIDKEISNLKAIDTLIRQEQPFAVYRIPGEDTPRLLTQASGSVRLLYDLKDLDGARGFVIAPFRASESCPIVLIQPEQWGQPLPLGEYAEEELEAFRLRQGRETFSEACTEEYEACFRTFIEALRSKQFDKLVLSRKSVIGQCPGFSPSAVFRAACKHYIHSYIYLCYTPRTDVWMGSTPEIILSGEKNEWSTVALAGTQPLQDGRLPQEWGEKNRQEQDYVASYIRRQLLSSGIHPTESGPYPAYAGALSHLKTSFRFTLKDNNRLGSLLELLHPTPAVCGLPKEEAYRFILDNEGYDRRYYSGFIGWLDPDGKTDLYVNLRCMHIENGQLSFYAGGGLLASSELNDEWLETEKKLQTMKRLVSMSL

SEQ ID NO: 93484 - protein, 370 aa, Bacteroides thetaiotaomicron
  REGION 1..370: note = tr|A0A0P0EWP6|A0A0P0EWP6_BACT4 Isochorismate synthase OS=Bacteroides thetaiotaomicron OX=818 GN=entC; PE = 4 SV=1
MIDEKSNLTTIDALIQRKQPFAVYRVPGEKYPRLLTEDVGAVRLIFDLKELNGQRGFVIAPFRIDKSCPIVLIQSDRTGQPLPMEIVAEEEQDLQSYPEESFHTLCTGKYATCFHTFIEALRDATFDKLVLSRSLTIGKNPEFSPSAVFRAACQRYIHSYIYLCYTPQTGVWLGSTPEIILSGEKNEWNTVALAGTQPLQNGKLPQVWDDKNRQEQDYVASYIRRQLLSLGIRSTESGPYPAYAGALSHLKTDFHFSLKDNKNLGDLLKVLHPTPAVCGLPKEEAYRFILENEGYDRKYYSGFIGWLDPEGRTDLYVNLRCMHIEDEQLTLYAGGGLLASSELNDEWQETEKKLQTMRRILVSAPIMMNH

SEQ ID NO: 93485 - protein, 369 aa, Bacteroides vulgatus
  REGION 1..369: note = tr|A0A069SMY6|A0A069SMY6_BACVU Isochorismate synthase family protein OS=Bacteroides vulgatus str. 3975 RP4 OX=1339352 GN=M099_0870 PE=4 SV=1
MDCLTHSRLGFALYRLPWTDECYLVLQTSGDVEQLADIQELNGKKGFVMAPFRISEEHPLVLIRPDVTAYDWSEISEALSSLECADALLTCKSRQSELSPFVSEETDKEQYTRAFGRFITPLQEKRFQKLVLSRSSARHIGDDFSPLGAFVRACNNYPRMMIYLCHTPASGTWLGSTPEILLSGHGKEWHTVALAGTMPMQNEVMPTDWDKKNREEQGYVADYIRRIAKRFGNKMTEKGPYTARAGQLVHLKTDFYFLLKNTDHIGDLLQELHPTPAVCGLPKEEAFRFIPDNEGYDRSYYSGFTGWLDTEGHTDIYVNLRCMEIKPGEAILYAGGGILASSEVESEWMETGDKMNTMRSILHPDFINK

SEQ ID NO: 93486 - protein, 371 aa, Bacteroides xylanisolvens
  REGION 1..371: note = tr|D4VPM6|D4VPM6_9BACE Isochorismate synthase @ Menaqui  none-specific isochorismate synthase; OS = Bacteroides xyl  anisolvens SD CC 1b OX=702447; GN = BN890_6970 PE=4 SV=1
MTDEEISNLTTIDAFIQRKQPFAVYRIPGEKVPRLLTQAEGVVRLIYDLKELNGQRGFVIAPFQVSESCPVVLIQPDQWGQPLPVDDDTEEDREIALRLQGQESFLTSSTEEYTACFHTFINALRDRTFDKLVLSRHLTVDKVADFSPSSIFRAACKRYIHSYIYLCYTPQTGIWLGSTPEIILSGEKDEWHTVALAGTQPLQDGRLPQVWDEKNRKEQDYVASYIRRQLLSLDIHSTENGPYPAYAGALSHLKTDFRFSLKDNKGLGDLLKVLHPTPAVCGLPKEEAYQFILQNEGYDRCYYSGFIGWLDPGGRTDLYVNLRCMHIEDKQLTLYAGGGLLASSELNDEWLETEKKLQTIKRLIAVPPLKS

SEQ ID NO: 93487 - protein, 498 aa, unidentified
  source 1..498: note = Bacteroidetes bacterium
  REGION 1..498: note = tr|A0A2T2URY3|A0A2T2URY3_9BACT Isochorismate synthase MenF OS=Bacteroidetes bacterium SW_9_63_38; OX = 1919118 GN=menF PE=3 SV=1
MPSSLPSCSHFSDHADPAGRTLAERVRAVLSETANGTTRRTRVCVPVDEPVEPIQWLRAQNQTEAVFWADRSPSTLGGDGRSLRSTACRADADGPRTVAGVGHADQVVRREQPIDYAALRRQLEGCFAHADAGLRYYGGLRFDVSQPPADRRDESLWTAFGTYRFVLPRIELIQQGDEQVLACNLVLPRDREHANAVVEAVEAVRMPSSLPQPTLPEPLRRTDRPEKEGWTRIVKWALNAISDQRLEKVVLARQVELGLERDVDPLRVLHHLKAATPGCFHFALRPSEGPTFLGASPERLFQWAGDRVVSEAVAGTRGRGATPEADAALREELLTSAKERREHAFVQQAIRDDLSTLCTSVESPETPSELMLARGRHLHARLTGTLRPDVTAVELLEALHPTPAVGGVPSDAALTAIREQEPFDRGWYAGPMGWVGPDAAEFSVAIRSGLVESTRLILFSGAGIVDGSEPEREWDEIEQKLGDFAAVLGLLGQTNGTP

SEQ ID NO: 93488 - protein, 481 aa, unidentified
  source 1..481: note = Baekduia soli
  REGION 1..481: note = tr|A0A5B8U861|A0A5B8U861_9ACTN Isochorismate synthase OS=Baekduia soli OX=496014 GN=FSW04_15630 PE=4; SV = 1
MALLPITSGAGGFVLSPDAVDRLERRMAEALRRARRHGEALGAITVTVDPATDPTAVVAASRRTGEPWFCLEQPDRDGAALAALGCTVAIEASGADRFTRVAARWRALASRAACDPPDGPRGCGPVAVGGFAFAPDGGAAPHWAGYAAASLHVPEATLVRRGGDVRLTLCALACPDDTTADLVDRLLRRVGELRAATALPMLDPDPAGRYRVASAMPPEHYEQAVARGVERIRAGDLEKVVLAREVQVHAPVDHDPAAVLGVLREAFPSCHLVCAGRGDAAFVAASPELLIRRDGLRAATLALAGSTRRSADPAVDDHLGERLLRSAKDREEQAIVSRRIARTLRPHAVWVTAPDEPEVVRMANIQHLGTPIRAQLARPVSTIELAGLLHPTPAVGGEPLPVAAPLIPALEGLDRGWYAGPVGWTDLDEDGEFVVALRCALLRGPVARCYAGVGVVRDSDPAAELAETEVKLQALLPVLAA

SEQ ID NO: 93489 - protein, 502 aa, Balneola sp.
  REGION 1..502: note = tr|A0A3M8FPS9|A0A3M8FPS9_9BACT Isochorismate synthase OS=Balneola sp. OX=2024824 GN=ED557_12650 PE=4; SV = 1
MLVNFQFILKIEKRGNKVPQVAEKKSSLSALFQKQIPESRLNRFLSELPSLDDNNLNYLAFSIQIPQIDPLAAIEQIPETNGFQYYWEKPVDDFAIAASGELYRITTRGKNRFREASRKGKELINKIHHCSGINHQNAVIHLFGGFSFFDKNESKSWSGFKSSSFTLPEWTIIKEGKCTILTICTKIKNFNEVHTNIERILSQLEPITSAEAYVLNGKQQSKSNFTVPDKTSAEYESWINSVDIAKTNISNGKFDKVVLARKIDISLDYEVKDTHILNKLRNQYPDCYSFLIRQNEHASFLGSTPERLASFTSEYVLTEGLAGSTSRGKTASEDAVLEYDLLHNPKDLEEHEIVLEAIEENLSYYSDDVKHPDQPSIKKLSNVQHLYTPITAKIKEGVSRTEVLKTLHPTPAVGGFPRNEAVEFIKEYEDFERGWYAAPFGWINAHGNGEFIVAIRSGLIMKDSVRFFAGCGIVKNSDPDKEWDETNLKFIPMLSTLEHARS

SEQ ID NO: 93490 - protein, 494 aa, unidentified
  source 1..494: note = Balneolaceae bacterium
  REGION 1..494: note = tr|A0A3D1G795|A0A3D1G795_9BACT Isochorismate synthase MenF OS=Balneolaceae bacterium OX=2053516 GN=menF; PE = 3 SV=1
MNSVYMQKANIKENKLYEAFKQQITQDDLEQFLSDRKDVLSDSAPQYLALSISISPVDALAAIEQDPNKEGFQYYWEKPVDQFSMAASGEIERIVTTGENRFRVSSQKGKEILSRVHHLSGINHRNAVVHLFGGFSFFDSEPESEWEAFKSASFTLPRWMIIREGNSTILTFITEMVKDQNFDELEDSIIKQLDELSCICDRDQYLQPDDLDRSLKYTNPDEYSSEHDQWVQAIEQATDKIKANEFRKVVLARKLSIPLSEEISDTRILNQLRKQYPDCYSFLIRQDDESSFIGSTPERLASFNSEFVLTEGLAGSTSRGKTASEDAMLENALMQSPKDLEEHEIVLNAISENLTDYSDKVLHPAHPQIKKLSNVQHLFTPITAQIKKGVSRTEMLKTLHPTPAVGGFPRNKAVQFIRETEDFERGWYASPIGWINAHGNGEFVVAIRSGLIKKDEVQFFAGCGIVEDSDPEKEWEETNLKFIPMLSALEYAGT

SEQ ID NO: 93491 - protein, 362 aa, Bdellovibrio bacteriovorus
  REGION 1..362: note = tr|Q6MHQ4|Q6MHQ4_BDEBA Menaquinone-specific isochorismate synthase OS=Bdellovibrio bacteriovorus (strain ATCC 15356 / DSM 50701 / NCIB 9529 / HD100); OX = 264462 GN=men F PE=4 SV=1
MDRQNSITLEGITNFLQAGALLRHGSQWILIEGPFTAQPTPNSVEISVFCPDFYDLTAPARWFGKARYTLSTEELRRICEVYLAQEPRTAEPLMTARWEEPRLEDFAEALSVIQSRIEKNEIQKAVPAVFARTNQTVTAQDRAQMLLKLSQAPATLFAYGFWKDGEGVLGATPETLFDFSKGVLKTMALAGTCPKSESTERESLLSDEKEMLEHRLVVEDLKERLSAWGTVQASAPYILELPTLYHLKTDISVVCQNQPNFVELVKALHPTPALGVAPRSAGYTWMKALPGQQGRRWFGGPFAFIGAEEALCLVGIRNLQWSQDSAMIGSGCGVVAASELDREWRELFQKRLSVKKILGLEV

SEQ ID NO: 93492 - protein, 325 aa, Bergeyella zoohelcum
  REGION 1..325: note = tr|A0A380ZTG8|A0A380ZTG8_9FLAO Isochorismate synthase entC OS=Bergeyella zoohelcum OX=1015 GN=entC PE=4; SV = 1
MILIRFPHQKDIFTIETTENNDFSVAFFDFDQQKKVHFSGRKRMATEHDFLKIEQLFQHKNFHLHAPSTPDDYPTYEEKIKTIKEFLTEENLPKLVFSRRKYHFFEDEISIVASFQKMCNTYPQALVYLFVSEQECWMGGFYEILGKYNKKNQEFHTMSLAGTLPLNESWTEKEIQEQNTVTQYITGIIKQYTSDYQISSLKDAISGNIKHLCTEFSAIINEKEVQNLIHALHPTPAVCGTPKHLCKKKIEELETEERKLYSGYIDIASAEEKNCFVNLRCAQIYANGAKIFVGGGINEQSHPEKEWLETELKAEAILKNLVFLR

SEQ ID NO: 93493 - protein, 461 aa, Bhargavaea cecembensis
  REGION 1..461: note = tr|M7P550|M7P550_9BACL Isochorismate synthase entC; OS = Bhargavaea cecembensis DSE10 OX=1235279 GN=entC PE=4; SV = 1
MKRKTTPDLITKTGRMMDGLRFYTETVESGRLSPQAFFEAGEAEFAGRRFYWENREKTRKMAGIGHAARLTSTDGDARFEDIRTQWQRLCSVIVKEEGDQSPVLFGGFSFDPENRRKSEWESFPAALFVVPQIQLVEKDGRTFVSINLISEEEAVAADFDRLRLIRDRLIHEAQVKEREPAVKPDVSRLQEYAKQDYLRAVEGVRDGIREGGPEKVVIARSIGLDFETPVRHSEVLEHLSAEQQESYLFGLESGEGFFFGATPERLVKMEGGRGLTACVAGSIRRGKTAEEDRLLGEGLLKDPKNREEHQFVVQMIGDVFRSFCSEVRIPAGPRLLKVRDIQHLFTPVEGTPNAGTDLLDLVQALHPTPALGGTPRDEALRMIRENEKMDRGFYGAPIGWMDTDGDGEFAVAIRSGLLKGDRAHLYAGGGIVAGSVPEEEYEETWVKFRPMMRALGGVLHG

SEQ ID NO: 93494 - protein, 422 aa, Bibersteinia trehalosi
  REGION 1..422: note = tr|M4RHK0|M4RHK0_BIBTR Isochorismate synthase MenF; OS = Bibersteinia trehalosi USDA-ARS-USMARC-192 OX=1171377; GN = menF PE=3 SV=1
MSVFTQLTQALSQQLAQNEVSAGLLRFSATVKCQPNDADLLSWLKGQACFPQMFWQQRAQRDTFVALGQVLRFQQLSAAEAFCHQHQVHLVGGIQFEGQIHFILPRLLLWQTEEQLRAELFGYADEQANLVAFLAQLDEPRTFGSTKNQVIAKKQLCSFEQWQTNIQQAISAIKTDAFDKVVLANATSWQLSSPLSGYDLLAKSRHLNQGCYHFLWAENLHECFIGSSPERLYQRQNKQLLTEALAGTVAVSHDITETAQNALWLLNDHKNLYENWLVVDDICTNLADCAGDIQVGDAHIKALKNVQHLRRFIQTELAPDIGDSQCLARIHPTAAVAGLPRTEAKQFIQQHEPFTRGWYAGTLGYFSPAQAEFCVTLRSALVRAKEMLVYAGAGIVAESEPESEWLEIERKALAMTNLVSSD

SEQ ID NO: 93495 - protein, 438 aa, Biostraticola sp.
  REGION 1..438: note = tr|A0A4U2UE34|A0A4U2UE34_9ENTR Isochorismate synthase MenF OS=Biostraticola sp. BGMRC 2031 OX=2575567; GN = menF PE=4 SV=1
MLSLLRSALQQHIATDIPAAPGIFQIILPWTPDGRISMLDWLNASPLFPQFYWQHRNGDLEAGACGGLKMFNRPAQAQAFLAGHADRPSLRLWGLNAFGSGAGEPDSSLFLPRLTWQRDVRTHRLIINLASDHSVLEDARHFAAQLATFVEAVPIEPLAVRETAACHQPERRQWADIISQALRALADGRFAKVVLARRTRLDLSGHVRAGALMAASKRVNRHCYHYLLRWSAQRAFLGSSPERLYRRRHNRLDTEALAGTAAVGETPAARARLADWLMNDDKNQRENLLVVDDICQRLHPAAVTLDVAPPEVIGLRTVQHLRRSIMAELDCRDDARCLSLLQPTAAVAGLPRDAARHFIAWHEPFERQWYAGSAGYLSLEQAEFNVSLRCALLENQSAWLYAGAGIIEGSDAEQEWAEIDHKADGMRTLFAASESINQ

SEQ ID NO: 93496 - protein, 426 aa, Bisgaardia hudsonensis
  REGION 1..426: note = tr|A0A4R2N250|A0A4R2N250_9PAST Isochorismate synthase MenF OS=Bisgaardia hudsonensis OX=109472 GN=menF; PE = 3 SV=1
MDTLQQIKRDLISIIKCHRPSRKEKISIFRFQVTGYLELLSWLKAQDLYPQFYLNFRDNDKKLASIGTVLSFSALNEAQQFILSNKVSLVGGMKFNNNVMFFLPRLLLEQTKDSLCIQFVINNEINWLDEKKEILELLDSLTLTKPIQDIKQTIQLQTKKASQQEWESWVEDVLREIKKGILTKVVLSNETNFVTDSPLDDKDFLAKSEKYNKDCYHFLLAENKHCTFLGSSPERLYQRNGQSLVTEAVAGTAVITDNEKQNKQQATWLLNDEKNGYENWLVVKDIKQNLFPHIEEINIQDKEIKRLRQVQHLKRRITARLKCGYLDQICLESIHPTAAVAGVPKKESKSFIQQVETFSREWYAGTLGIMAEDYAEFTVTIRSAFIEDNNIRILAGAGIVEGSVPLLEWEEIERKALGLISLLHKE

SEQ ID NO: 93497 - protein, 419 aa, Blastochloris viridis
  REGION 1..419: note = tr|A0A0P0IXY0|A0A0P0IXY0_BLAVI Isochorismate synthase dhbC OS=Blastochloris viridis OX=1079 GN=dhbC; PE = 4 SV=1
MKTQTRPEPAALPQTAPSRPAPPRHLFARPAADPGPAAPAPGERGSLFAFQSRGTLLHGLGTAAALPRGSIASLEARLATFFRAAGIEAMLAGALPFDRSADDCLWQARRVVRTAPPKQGMPCAATDAAWQLSHAPDAAGYEAAVRRALDLMAAEAGTAGGLEKIVLSRSLVTTAERDIDVAALFRRLAADPAATAFLVPLPERGGVPRVMAGATPELLVAKAGRRVSSHPLAGSARRRADLAEDAAVAARLAASDKDRQEHGIVAEFILDTLAPFCRRLFRPQGMALASTATMWHLGTRIEGELKDPEVPAAVLAAALHPTPAVCGVPREKAARHIGSLEGYARDFYAGAVGWCDGRGDGAWYVTIRCAEISGRQARLYAGAGIVPGSDPRAEAEETAAKYAALLTALGIPPLGEERS

SEQ ID NO: 93498 - protein, 416 aa, Blastococcus sp.
  REGION 1..416: note = tr|A0A4Y9NDJ6|A0A4Y9NDJ6_9ACTN Isochorismate synthase OS=Blastococcus sp. AZ43 OX=2559606; GN = E4P37_09975 PE=4 SV=1
MTAAALGSPEAAARTVTTVRTEAAAELLDRLPAEGALSWVRRGEGLVGWGEAARLEVTGPRALQEAADWWAAWTTGLDTDDALGVAGSGPVLFASIAFDPAVGTSVFVVPEVVLGRRGGVSWLTTVGDVDPREVLLRKRVDDGPAPRLRYADGALDPASWCAAVAAAVARIGDGDLQKVVLARDLLVSSDVPLDPRRLLRKLAARFPDCWTFAVDGLLGATPELLLRREGRQLSSRVLAGTAPRGAGADDDRLAAALIASAKDRAEHALAVESVVRALEPFCATLDAPTEPELLTLANVRHLATDVTATQRPGAGLLELVGAVHPTAAVCGTPRAEAGTLIGELEGMDRGRYAGPVGWLDARGDGEFGLALRCAELLGDDGARLFAGCGIVAGSDPASELAETQSKFAAFQAALEG

SEQ ID NO: 93499 - protein, 346 aa, Blattabacterium sp.
  REGION 1..346: note = tr|D0JAM6|D0JAM6_BLASB Isochorismate synthase; OS = Blattabacterium sp. subsp. Blattella germanica (strain Bge) OX=331104 GN=entC PE=4 SV=1
MYQKISIFSLYKKIIKNYWNHNRFVIFRKPNENQVFFYSHSDSDSKEEKFFIIQDFDHNYTIKIVPKKIYCSDIQKSFVRKSYEKNSFLLTDSLEYKNLIKKAIEKIRKGYFKKVVLSRSIKISFHSFYWKKTFQKLIVSYPNALVSLWYDIRHGFWIGCTPELLMQIHKRKFKTVALAGTIWNKYKWTKKEKEEHQIVIKYIIHLLKKNYNGSIVLEETKTVKMGHLKHLETPIFFYFSEEPDYYEILNKLHPTPSICGAPKKESLDFIQKHEGYTRNFYTGYIGIVNRKSMEFYIHLRCARIKEDKKEITLYAGSGITIDSDIDREYLETKNKVQNIFSQLFFK

SEQ ID NO: 93500 - protein, 392 aa, Bordetella sp.
  REGION 1..392: note = tr|A0A2V1K223|A0A2V1K223_9BORD Isochorismate synthase OS=Bordetella sp. 3d-2-2 OX=2175229; GN = DD235_03045 PE=4 SV=1
MTVACHAFYPEAASVADADLSRDLFFAAAGRWLLAQGGKAVPTQGGSLGERVRQALAATGDPDAVVVGAVPFDVRQPAQLWIPAHCQRGVLDEPTRLPFAAGHGGEVATMRAGTVRLMPEPAMFEALVQQALVRLEQENLRKLVLARMLSFDLDAPLDQAWLLEKLLAQHPQGHVFSVPLDAASGGGVLLGASPELLVRRQGRRITLNPLAGSAARQHEPAQDRSVAEALLRSDKDRREHAIVIEDIVRILQPYCRTLTVPDGPELLATDTLWHLSSVLEGELYDLDMTSLDLALALHPTPAVCGWPTAQAFAAIEDLEPFSRDFYAGFVGWCAASGDGEWAVTLRCGVCHPGQVRLYAGAGVVPGSVPAMERAETGVKFQTMLNGLGVTLS

SEQ ID NO: 93501 - protein, 387 aa, Bosea sp.
  REGION 1..387: note = tr|A0A5E8CDT7|A0A5E8CDT7_9BRAD Isochorismate synthase 1 OS=Bosea sp. EC-HK365B OX=2038386 GN=entC PE=4; SV = 1
MLESLALKQNLNFKFGALFASNGRELLSSGIHEWISVPAHGGQDRGQGLHAAVEAAFERARRAGQANPILIGAIPFDVREPSCLYVPAAHEWREQAAPVQAAGEQLDVPDLLDQRSLPDEDGFKRAVEHAIVNFRHSDVRKAVLSVVRELRFAGSMDVGRLLASLRAQNSQGYLFRIPLPDEGELVGVSPELLIRKQGGRIVSNPLAGSAKRQPDPQADRAAAEQLERSQKDQYEHRLVIENIRSILAPLCAELDVPDAPSLMSTAAMWHLSTRIEGALNDPAMTALQLACVIHPTPAVCGFPTESAHKLIRYVEPFERGLFTGLVGWCDAQGNGEWAITIRCGIARRDTLRLFAGAGIVEASNPASEWEEVQAKLGTMLSACGLAA

SEQ ID NO: 93502 - protein, 435 aa, Brachybacterium nesterenkovii
  REGION 1..435: note = tr|A0A1X6WYM0|A0A1X6WYM0_9MICO Menaquinone-specific isochorismate synthase OS=Brachybacterium nesterenkovii; OX = 47847 GN=FM110_05815 PE=4 SV=1
MSTPQNAPVPAGLPVAASCGTSPATLHVRTIRIDDDVDLLRHIPAGVSAAWLHHGQGFVGLGGAVRIENAGPARFAEASAAFRELCAGAVVDDEVRVRGTGPVALGSFSYAASSPRPSALVIPEAILGVSEGTAFLTLAALGAPPADDVCWRDLFGSTPAGAPAELEVEPDHTPREYQGMVAGAVDRIRAGAAEKIVLSETSTVTASAPLSPAVLLRRLAERFGTTWVYLAADVIGASPEMLAQTDDGRVFSRVLAGTRPVADDEGLAEDERRAFRTDAKERSEHAFAVDSVTERLADVATDVRASAEPFVLRLPGLEHLASDVSARTLPGVTSLDVAAALHPSAAVSGTPRERADGIIAELETHDRGGYAAPVGWMDARGDGQWAIALRMAHLLDERTVRLQAGGGIVGASDPVVEHAEVLAKQRPMLGALRGA

SEQ ID NO: 93503 - protein, 433 aa, Brachybacterium saurashtrense
  REGION 1..433: note = tr|A0A345YPH7|A0A345YPH7_9MICO Isochorismate synthase OS=Brachybacterium saurashtrense OX=556288; GN = DWV08_09560 PE=4 SV=1
MARMSAPHLTPDAAPVPAALHVRTVRLEEEVDLLGHVPAEVSGAWLRHGQGMVALGTAWSVQTAGPHRFTAAAAAFRQVAEHARVDDEVRVRPSGLIALGSFSYADSSPRPSTLMVPRAVLGVHDGESFLTVVGVDEEPQLPASWRDLFPSTPRDPASAPLEVEPDHTPDEYQALVQEAVAGIRAGRAEKVVLSERTTVRSPAPLSRAVLLARLARAYPSTWVYHLDDVIGASPEMLAQTEDGRVFSRVLAGSRPVADGGELDEQDRRAFRADAKERSEHAFAVDSVVERLEGLAEHLEVSPEPFVLRLPGLEHLASDVSAALRAGTTSLDVAARLHPSAAVSGTPRAEADGIIARLEPHDRGGYASPVGWMDADGDGQWAIALRMAHLRDERTAVLQAGGGLVAASDPVSEHAEALAKCRPMLRALRGEETG

SEQ ID NO: 93504 - protein, 432 aa, Brachybacterium sp.
  REGION 1..432: note = tr|A0A0M9UL10|A0A0M9UL10_9MICO Menaquinone-specific isochorismate synthase OS=Brachybacterium sp. SW0106-09; OX = 1704590 GN=Y09_1523 PE=4 SV=1
MSAPLTRPDLSAPASATPLVRTVRIEEPMDLLGHVPAGVSGAWLRHGQGLVAVGRAWSVRTTGPDRFAAASAAFRELASRARVDDEVRVRTSGLIALGSFSYAGTSERPSTLLVPRALLGVHDGEAFLTVVGIDEEPELPASWRDLFPSSPVDVPAASPLELEADHTPDEYQALVQQAVGEIRSGAAEKVVLSERTSVRTPEPLSPALLLTRLARAYPSTWVYHLEDVIGASPEMLAQTEDGRVFSRVLAGSRPAADDGELDEADRRAFRADRKERSEHAYAVDSVVERLEDLAAEIEVSAEPFVLRLPGLEHLASDVSARLHEGVTSLDVAARLHPSAAVSGTPRERADEIIARLEPHDRGGYAAPVGWMDASGDGQWAIALRMAHLTGERSAVLQAGGGLVAASDPVSEHAEALAKCRPMLRSLRGDAEA

SEQ ID NO: 93505 - protein, 460 aa, unidentified
  source 1..460: note = Bradymonadaceae bacterium
  REGION 1..460: note = tr|A0A3D8MXT5|A0A3D8MXT5_9DELT Isochorismate synthase OS=Bradymonadaceae bacterium TMQ3 OX=2283320; GN = DV096_00780 PE=4 SV=1
MSPPRPQQPADRSATRLHFTVQALKEDLCLAEIFERARSFTRASYLRLPQHGAACGEELVGLGCAWEATFGDTGNDTGFASANAVLRAFRHSAGDTEDVRLFAYAAFDPSYAPGDDVTWNAFERRALYLPELLLMRRDAQLFAVIAHLDHASPTAMSEWLARVNDAQHPAQPPATDGACTSLDLRNEETRFTANVASVVASAGTSAPVEKIVYARRATAERSSHFKLDRVIAALNADFSGCATFALSPHPGAPTFVGATPETLVSAHHNQLQTMALAGTTRGGSPPQSPERAAAEDNLLHSAKDRHEHQVVVEMITSSLKHHGASPSYNDTPGIRRLTNVSHLETPIRAEITDTFGLLEAIDALHPTPAVCGQPRQAARQAIARDEGFDRGLYAGPIGAMSPEGEGQIFVALRCGLVHHDQALLFAGAGITADSDPHVEWAETHQKLAALQNALTAEDLP

SEQ ID NO: 93506 - protein, 419 aa, unidentified
  source 1..419: note = Bradymonadales bacterium
  REGION 1..419: note = tr|A0A5B8XSC9|A0A5B8XSC9_9DELT Isochorismate synthase OS=Bradymonadales bacterium V1718 OX=2600177; GN = FRD01_12815 PE=4 SV=1
MVVPIDDVDPWSLVRAVPSHRTWRAWRGPNGDFHLAVGHAWRMSTNGRSPALDLSDLGRMLKDTPGQIATISVAFDPKRTHQKDQIWKDFAPIEISVPEVLFQRVGGRWSLTIVADAERFETVERGAKAIHQSALTGTVPEAQIEGQVEFGTYRAEVQRALEALHNEDVSKIVMARKAEFRANSEIDHARVLRRLDERFPNCFVFAHRAGGSQSGPGAVFLGASPERLVACDSGTLHTEALAGSAGVGQSETERSELANALMKSEKDLREHHHVVDYIQEILGPITSGFELGELGVKSLKNVQHLHTPIRAKLKEGATILDAVKVLHPTSAVGGSPRERALELIAEIEGFDRGWYAGALGWMGLGDSTDGELTVAIRSAMIRKNIAELYAGAGIVVGSDPVAEDQETRVKMRALLEALE

SEQ ID NO: 93507 - protein, 443 aa, unidentified
  source 1..443: note = Bradymonas sp.
  REGION 1..443: note = tr|A0A4Y6Q1K1|A0A4Y6Q1K1_9DELT Isochorismate synthase OS=Bradymonas sp. YN101 OX=2589075 GN=FIV42_27750; PE = 4 SV=1
MTRPLSQLSAPGQLAAKVFETEHTDLLDLYRRASGRASSFYRRNSQGTEVLGLGVALQFVADDADDATMAELHERLSERLADVSGDTSKLRIFGWTAFDVANSRRAHAGLPDWSAYARRQLYVPQVLLRCRDGKTDAVVLAEPADVDETWAAWQETFRSTVEIPSPSATEPEVRWLDQDEFRRGVGLVTDERVAPKVVLARRAHIEAAAPIDTTTVLRRLTHAYPSCSVFALSPHAESPYPVFAGATPETLARVNDGHVETMALAGTSRNDAGQAPDLAAERALLSSQKDLDEHRFVLDMIVDALEPLCSSVAADPEPRPHRLANVSHLMTKISGELAEDVGLAEVVDALHPTPAVCGTPRDLAKRLIGEIEGFDRGLYAGAFGSMDLEGNGQFDVALRCGLIDGASALLFAGAGITADSDVDVELTETRSKFAPLLDAISKE

SEQ ID NO: 93508 - protein, 377 aa, Bradyrhizobium sp.
  REGION 1..377: note = tr|A0A5E8VQI5|A0A5E8VQI5_9BRAD Isochorismate synthase OS=Bradyrhizobium sp. LVM 105 OX=2341115; GN = D6B98_00475 PE=4 SV=1
MKTAGETMLALGQIATLGDGPLADLAARAAGFFEKRTEGPDVLVGALPFDPGRPSHLVQPERVLRVQGRHDIGAIPGLDGLASARAGAAGILSVDADPAAAEFAHAVAVALGQLTAADASLRKVVLSRSLKVTANRDFSAADLMRRLSADDSVTVFATPLPTRGHQRRSLIGATPELLVEKRGGQICSHPLAGSARRHRDTEEDRKAGAGLLASDKDRREHKLVVESVLDTLAPYCVGLSAPEGTCLRATSSMWHLGTRIVGQLKDASLSSIYFAGLLHPTPAVCGLPRRLAHDQIVKLEPYDREFYAGAVGWCDSAGDGRWHVSIRCAEIEGRHARLYAGAGIVPGSTPEGELAETSAKFRAMLDAFGIDGSRFDA

SEQ ID NO: 93509 - protein, 442 aa, Brenneria alni
  REGION 1..442: note = tr|A0A421DTH0|A0A421DTH0_9GAMM Isochorismate synthase MenF OS=Brenneria alni OX=71656 GN=menF PE=3 SV=1
MKQLSDLLRHMQQDLRQPQPASAGFRQITRSLTISEPSELLPWLATQPVYPQFYWRHRQESEEAAVCGRVCGFQHIQAAEAFLLQQGCGRNVRIWGMNAFNQTPGERGPAVSPSYLFLPRVEWRRQGNKLSLQINLFSETSLQQDADEASAFVNLLLPGRPLLPLQAEIRTVDHLPDRQNWINLLQQTLLDIAAGELKKVVLARATTLTLKQPLPATTLMAASRAANHHCFHFMLAHDARQAFLGSSPERLYRRKDTQLETEALAGTVASDKDESRAAALANWLMKDTKNQCENRLVVEDICQRLRQSALSLNVMPPEIVRLRKVQHLRRTIQAVLRERSDVVCFNNLHPTAAVAGFPRAVARRFIAGHEPFDRGWYAGSAGYLSRQQSEFCVALRSAEISDNVLKLYAGAGIVAGSDPEQEWQELENKAAGLKSLLEGDIS

SEQ ID NO: 93510 - protein, 431 aa, unidentified
  source 1..431: note = Brenneria goodwinii
  REGION 1..431: note = tr|A0A0G4JPF9|A0A0G4JPF9_9GAMM Isochorismate synthase MenF OS=Brenneria goodwinii OX=1109412 GN=menF; PE = 3 SV=1
MQQALRKPQPINAGFRQITHSLVISEAAELLPWLATQPVYPQFYWQHRQDNEEAAVCGRVCGFHHIQDAEAFLTRQKCARNVRIWGLNAFNQTSQRAQGASPSYLFLPRVELLRQGNTLSLQINLYSETSLQQDAEEASAFINFLLPMRPQPPLQTQIEKIEHQPDRQRWGSLLQLALRDIAAGAMEKVVLARATTLTLDRPLQATTFMAASRAANHRCFHFMLAHDARQAFLGSSPERLYRRCDERLETEALAGTAASDKDANKTAALADWLMKDTKNQCENMMVVDDICQRLRRSARSLDVMPPEIIRLRKVQHLRRAILAELKERSDAVCLDDLQPTAAVAGLPRAVARRFIAEHEPFERGWYAGSAGYLSLQQSEFCVALRSAEISDNILKLYAGAGILAGSDPEQEWLELENKAAGLKSLLEGDMS

SEQ ID NO: 93511 - protein, 444 aa, unidentified
  source 1..444: note = Brenneria roseae
  REGION 1..444: note = tr|A0A2U1U0A5|A0A2U1U0A5_9GAMM Isochorismate synthase MenF OS=Brenneria roseae subsp. americana; OX = 1508507 GN=menF PE=3 SV=1
MKQLSDLLWHMQQDLREPQPESAGFRQITRSLILSEREPSGLLSWLATQPAYPQFYWQHRQDDEEAAVCGLVCGFHHAQEAEDFLLQHGCDSHVRIWGLNAFDQTPREYRSGISPSYLFLPRVELLRQGNTLSLRINLFSGASLQQDADEASAFIKFLLPIRPLPPLQAEVDVVDHRPDRQNWIKLLQQALHNIATGEMEKVVLARKTTLTLKQPLQATTFMAASRAANHHCFHFMLAHNARQAFLGSSPERLYRRDDTRLETEALAGTVASDKDDEKAAAFAHWLMKDTKNQCENMLVVDDICQRLQQSALSLDVMPPEVVRLRKVQHLRRAIQATLRQPSDVVCLDNLQPTAAVAGLPRRVARRFIAEKEPFERGWYAGSAGYLSRRQAEFCVALRSAEINNNILTLYAGAGIVAGSDPEQEWQELENKAAGLKSLLDGDMS

SEQ ID NO: 93512 - protein, 442 aa, Brenneria rubrifaciens
  REGION 1..442: note = tr|A0A4P8QQZ0|A0A4P8QQZ0_9GAMM Isochorismate synthase MenF OS=Brenneria rubrifaciens OX=55213 GN=menF; PE = 3 SV=1
MKQLSDLLRDVQQDLCQPQPENAGFRQITGSLTLGEPIDLLSWLATQPAYPQFYWQHRQDSEEAAVCGQVCGFHSIEEAESFLLRQGCDRHTRIWGLNAFDRSAREHGAGISSSSLFLPRVELLRQNHTLSLRINLFSETSLQQDADDAAAFIKLLLPMRPLPPLQAEVCAVSHLPDRRNWIKLLQQTLGRIAAGEMEKVVLARKTTLTLKQPLQATTFMAASRAVNHHCFHFMLAHDARQAFLGSSPERLYRRRETRLETEALAGTVASGKNDETAAALAHWLMKDTKNQCENMLVVDDICQRLRQSALSLDVRPAEVVRLRKVQHLRRIIQATLRKQSDAACLEDLQPTAAVAGLPRPPARHFIAENEPFARGWYAGSAGYLSRCQSEFCVALRSAEISDHILSLYAGAGIVAGSDPEQEWQELESKAAGLRSLLDGVMS

SEQ ID NO: 93513 - protein, 432 aa, Brenneria salicis
  REGION 1..432: note = tr|A0A366IBL0|A0A366IBL0_9GAMM Isochorismate synthase MenF OS=Brenneria salicis ATCC 15712 = DSM 30166; OX = 714314 GN=menF PE=3 SV=1
MQQDLRQPQAEHAGFRQITHSLTLSEPSDLLSWLATQPAYPQFYWRHRQDSEEAAVCGQVCGFHHIQEAEDFLVRHGGDHPVRVWGLNAFDQSPRDPRTGTSPGYLFLPRVELLRQENTLSLRVNLFSETSLRQDADKAAAFIKFLLPMRPLPPLQTQASDVEHQPDRQQWRNLLQQALHNIAAGEMEKVVLARKTTLTLKQPLQATTFMAASCAANHHCFHFMLAHDARQAFLGSSPERLYRRHDTQLETEALAGTVVSDKCDEKAAALAQWLMKDSKNQCENMLVVDDICQRLRQSALSLDVMPPEVVRLRKVQHLRRTIQATLRQPSDSVCLDDLQPTAAVAGLPRHIARRFIIGNEPFDRGWYAGSAGYLSRRQAEFCVALRSAHIHDNRLILYAGAGIVAGSDPEQEWQELENKTAGLKSLLDGDML

SEQ ID NO: 93514 - protein, 375 aa, Brenneria sp.
  REGION 1..375: note = tr|G7LM41|G7LM41_9GAMM Isochorismate synthase; OS = Brenneria sp. EniD312 OX=598467 GN=BrE312_3977 PE=4 SV=1
MGTPFHHHSFLFSSAFRSLYTEGVFKTLTWPASDPSALCQKVAHGFEQARLAGITRPIVVGAIPFDVRQPSSLYIPHACHFLSREAFKQKLSATPQTPLRIVDQQPHPQREYFLAMVESAVNAIRQGELQKIVLSRLQSVQVEHPLNTIALLATLAEQNPNGYYFHLPLAEKRYLFGASPELLLRQQGRSIWSTPLAGTAKRAADERQDRDSRDRLLTSRKDRHEHQLVIEEIRQTLAGYCSSLSIPPQPELLPTPNLWHLASPIAGELKADNSQSLSLAGLLHPTPALCGVPKEKARRLISELEPFERGVFGGIVGWSDDEGNGEWAVTIRCGISQQQHIQLYAGAGIVADSDPAAEWLEIEAKMRTMLRALGQ

SEQ ID NO: 93515 - protein, 997 aa, Brevibacillus laterosporus
  REGION 1..997: note = tr|H0U6D6|H0U6D6_BRELA Salicylate synthase; OS = Brevibacillus laterosporus GI-9 OX=1118154 GN=dhbE PE=4; SV = 1
MKATTEWFEDTAKNYEQLGFWEPKTLGQQLRIWAQQYQNREALVEGDSRLTYKELDNQVDELASGFIQMGIKKGDNVAVQLPNRISFVLTCFALFRIGALPILVLPAHREAELDGIFTLAKPVAYIIPTTFLGFDYTKMAQQLVKKHPSVKFVMTDGESDIGINLADISGTPAELDVPSYKDTALLLLSGGTTGTPKLIPRTHADYAYNAKAAATRCKLTPQSVYLAVLPIAHNFPLCCPGILGTLSAGGKVVLCQTTSCDEAFPLIEKERVTITALVPSIVQVWLEVLEWDTSNDLSSLEVLQVGGSMLDENLAKRVIHEMKCKLQQVFGMAEGLICCTSLDDPESVIISCQGRPLSDADEVRIVDEYGNDVEAGAYGELIVRGPYTISGYYRAPEQNRESFTPDGFYRSGDKARITPEGNFQIGGRIKEQINRAGEKIMPAEVEAYLRMHPDIKDAALITLPDPTLGEKSCAYVITDNQDITLADIHAFFHEKGVARYKMPDQIEFIDYWPLTSVGKVNKAKLKELATAPKSHATTCEVSYLEETIAFEGDVHLAASQIVEQGLYENYLLYENGDELSLGMGIHALLTVDEQHTTLAYDNQTIRFENNLLSATIDKAFASIPLKNWRAYGTVNFGMARYYQNLPLLSEAGRLIKLFIPEVEIRFTKGSILLRALREEKRNEFADLLRKLRENGLDDEKDTLVQRVVSQKLDVPEVDTYGAEAYMQGVAEAVREIKERKYHKVILSRKIPIHQELDMVASYIAGRRVNTPARSFLLSLDGLHVAGFSPETVVEVDSNGWVSTFPLAGTRSRGRNEDEGDKLKDELLNDPKEIAEHAVSVKLAFEELKSVCDSTTILLSDFMSVASRGTVQHIASRLKGKIKPEFNSWDAFRALFPAVTASGIPKKESIDAIGRLESEPRNLYSGCVMTFDSDGAMDAALVLRTIYQQNNSAWLHAGAGVVEMSLPTRELEETREKLSSFSRQLVVSSREVEKVKPV

SEQ ID NO: 93516 - protein, 454 aa, Brevibacterium antiquum
  REGION 1..454: note = tr|A0A2H1K6L8|A0A2H1K6L8_9MICO Isochorismate synthase OS=Brevibacterium antiquum OX=234835; GN = BANT10_02737 PE=4 SV=1
MTTTFTTSDICAAPPRLHVRSRFVDDVEPGPGFPFESGLPTTVEQTLELLPTSAFSCWVRDTSGLIGFGRTLRIRARGRARFTELSEAWKAITGAATIEDEVDLLGSGLMCFATVAYSGESEVDSLIHVPEFVLGRRGGRVWMTSIIAEGATPTPPVLKSEPLHRVTSAKSSPGDLDAATWANLVATVSRMLTPVGDSAEVDAFADDSTLRKIVLARDELVTTDDDIDVRSVLGALNRSYPSCWTFNVAGLIGSTPELLIGVENNRVTSRVLAGTYRVENDPTTEMPAARKLLSAHKDSTEHAFAIASLQRSLGLVAGDVSVDERPHLLPLANVIHSASDASAHLPEDSCLNALDIAAAVHPTAAVGGYPQASAVAHVDELEPLDRGRYSGPVGWMDDRGNGQFGIALRCGQLEDRNRIRLFAGAGIMPDSDPLAEVAETDAKFAPMRRALGLE

SEQ ID NO: 93517 - protein, 454 aa, Brevibacterium aurantiacum
  REGION 1..454: note = tr|A0A2A3YQW4|A0A2A3YQW4_9MICO Isochorismate synthase OS=Brevibacterium aurantiacum OX=273384; GN = BAURA63_01408 PE=4 SV=1
MTTTFSTSDICTAPPRLHVSSRFVDDVEPGPGFPFESGLPTSVEETLELLPTSAFSCWVRDTSGLIGFGRTLRIRARGRDRFTELSKAWKAITDAASIEDEVDLLGSGLMCFATVAYSGESEVDSLIHVPEFVLGRRGGRVWMTSIITEGATPVPPVLKSEPLRRVTSATSSPGDLDSSSWADLVAKVSQMLTPVGDSAEVDPFTEDSTLRKIVLARDELVTSDDDIDVRSVLGELNRSYPSCWTFDVAGLIGSTPELLIGVENARVTSRVLAGTYRVENDPTSEMPAARKLLSAHKDSTEHAFAIASLQRSLSSVADDVSVDERPHLLPLANVIHSASDASAHLPEDSCLNALDIAAAVHPTAAVGGYPQASAIAHVDELEPLDRGRYSGPVGWMDDRGNGQFGIALRCGQLEDRNRIRLFAGAGIMPDSDPLAEVAETEAKFAPMRRALGLE

SEQ ID NO: 93518 - protein, 454 aa, Brevibacterium casei
  REGION 1..454: note = tr|A0A2H1IS52|A0A2H1IS52_9MICO Isochorismate synthase OS=Brevibacterium casei CIP 102111 OX=1255625; GN = BC102111_01522 PE=4 SV=1
MTTTLSSSDITADTPRLTVRSRFVDDVDPGPGFPFESGLPTTVEQTLALLPTSAFSCWVRDTSGLIGFGRTLRIRARGRNRFTELSEAWKAITAVAVIEDEVDHLGSGLMCFATVTYSQDSEVDSLLHIPEFVLGRRGGRVWMTTIAAEGATPVPPVLREEALRPVTSASESPGDLDEETWADLVATVSAMLTPVGSPTEVDPASDDATLRKVVLARDEVVTTDEEIDVRSVLGALNRSYPSCWTFDIAGLIGATPELLIGVEHGRVTSRVLAGTYRVEEDPTAEMAEARKLLSAHKDSTEHAFAIASLQRSLGSVAADVSVDDRPHLLPLANVIHSASDATGHLPEDSGLNALDVAAAVHPTAAVGGYPQASAVALVDELEPLDRGRYSGPVGWMDDRGNGQFGIALRCGQLEDRNRIRLYAGAGIMPDSDPAAEVAETEAKFAPMRRALGLI

SEQ ID NO: 93519 - protein, 456 aa, Brevibacterium iodinum
  REGION 1..456: note = tr|A0A2H1JXA1|A0A2H1JXA1_9MICO Isochorismate synthase OS=Brevibacterium iodinum ATCC 49514 OX=1255616; GN = BI49514_02427 PE=4 SV=1
MTTTFGTSDILSAPPRLHVRSRFVDDVDPGPGFPFESGLPTTVEQTLELLPTDGFSCWVRDTSGLIGFGRTLRIRARGPERFTELSDAWKAITEAAAVEDEVDLLGSGLMCFATVAYSGESAVDSIIHVPEFVLGRRGGRVWLTSISAAEEPPLPPILHAEPLQRVHSARAETGELDPDKWSRLVEQVAAMLTPIDNSAEVDAFSDDPTLRKIVLARDEVVTTEEDIDVRAVLGALNRSYPSCWTFDIAGLIGSTPELLIGVENNRVTSRVLAGTYRVENNPMEEMPAARKLLSAHKDSTEHAFAIASLQRSLGSVAEDVTVDERPHLLPLANVIHSASDAQANLSPDSGLTALDVAASVHPTAAVGGYPQASAVAHVDELEPLDRGRYSGPVGWMDGRGNGQFGIALRCGQLEDRNRIRLYAGAGIMPDSDPVTEVAETNAKLAPMRRALGLDRD

SEQ ID NO: 93520 - protein, 473 aa, unidentified
  source 1..473: note = Brevibacterium jeotgali
  REGION 1..473: note = tr|A0A2H1L152|A0A2H1L152_9MICO Isochorismate synthase OS=Brevibacterium jeotgali OX=1262550; GN = BJEO58_00090 PE=4 SV=1
MTHSSRTSDPTPRLTVRSWFVDGLAPDAPPPFAGNIPTSSLDFLAQLPTSGFACWVRGRSGLVGIGRRLRLHARGEHRFHDLARQWDDLVAAAVVDDRVSLMGSGLVGFSAISFAADSGVDSVIDVPEYILGRRDGRVWLTHVRDGDDGACGHSPDDRSAGSEDVDAPSDELVAGLQLTPTPLRDQRIVTREPGRVSPERFEEIVALAASRLRSPEAGERKIVLARDEVITAEDDIDVRTVLGRLNAEFPSTWAFLVAGLVGATPELLIGVEDGAVHSRVLAGTYRVQEDPEKEVADAREHLGGRKDSVEHSYAIDSLASTLGPVTEELHVDPEPHLLQLANVIHLASDAHGRLSTRADGSRISPFEVAHAVHPTAAVGGTPRARAMDLISRFEEMDRGRYAGPVGWVDGYGNGQFGIALRCGQLEERNRIRLFAGAGIMPDSDPESERRETDAKFAPMRRALGVEWSPDTSH

SEQ ID NO: 93521 - protein, 456 aa, Brevibacterium linens
  REGION 1..456: note = tr|A0A0B9AXT1|A0A0B9AXT1_BRELN Isochorismate synthase OS=Brevibacterium linens OX=1703 GN=AE0388_0370; PE = 4 SV=1
MTTTFGTSDILSAPPRLHVRSRFVDDVDPGPGFPFESGLPTTVEQTLELLPTDGFSCWVRDTSGLIGFGRTLRIRARGPKRFAELSDAWKAITEAAEVEDEVDLLGSGLMCFATVAYSGESAVDSIIHVPEFVLGRRGGRVWLTSISTAEVPPLPPILHAEPLQRVQTARAEAGELDPEKWSRLVEQVADMLTPIDTSAEVDAFSDDPTLRKIVLARDEVVTTDEDIDVRAVLGALNRSYPSCWTFDIAGLIGSTPELLIGVEDNKVTSRVLAGTYRVEKNPMDEMPAARKLLSAHKDSTEHAFAIASLQRSLGSVAEDVTVDERPHLLPLANVIHSASDAQATLADDSGLNALDVAAAVHPTAAVGGYPQASAVAHVDELEPLDRGRYSGPVGWMDGRGNGQFGIALRCGQLEDRNRIRLFAGAGIMPDSDPATEVAETNAKLAPMRRALGLDRG

SEQ ID NO: 93522 - protein, 452 aa, Brevibacterium mcbrellneri
  REGION 1..452: note = tr|D4YQ44|D4YQ44_9MICO Isochorismate synthase; OS = Brevibacterium mcbrellneri ATCC 49030 OX=585530 GN=menF; PE = 4 SV=1
MKDVNGETNAETLTVRPGDTVPTLSVRSWFVDGVTPESPAPFVGGLPATSMEFLTQLPTDTLACWVRGNSGLVGFGRAVRIRARGANRFSDLSTMWRSISGNATVDNPVRLPGSGLVGFTTIAFAEDSQAESVIDIPQFIMGRRDGRVWLTAVNVTGTPHTELKLRDVALQTPRDPQVHDGHVSGERYTRAVTEAIEIMQSGRASKIVVAQDAVVETSNDIDVRALVGALNQAYPSTWTFCVAGMVGATPELLISRSGDRVESRVLAGTYRVAHDPRSELAAARAQLGGAKDTAEHRYAIDSLAQTLKPLCSELEVDPEPHLLALSNVIHLASDAHGVVKPGHTLLDVAQAVHPTAAVGGVPREAAWEHIAHVEKADRGRYAGPVGWIDGNGDGQLGIALRCGQLESRNKIRLWAGCGIMPDSDPASELAETRAKLTPMMTALGVAHLIDQV

SEQ ID NO: 93523 - protein, 447 aa, Brevibacterium ravenspurgense
  REGION 1..447: note = tr|A0A150H943|A0A150H943_9MICO Isochorismate synthase EntC OS=Brevibacterium ravenspurgense OX=479117; GN = entC PE=4 SV=1
MLSDSVSLRVRSWFIDGVDPHAPAPFAHGLPSTVHEFLAQLPQDTFNCWVRGHSGLVGFGRVARLRATGGETVEGRTRFDQLSQQWRAVAQRALVEDSVNLPGSGLVGFTAISFTDDSDTDSVIDIPRFIMGRRHERVWLTSISQEGSADDDFTLEAAALTPVTGASLHDGHISQEQHIRNVSEAVKLMRAPGSQFKKIVVARDAVVDTEHDIDVRAVLGALNAAYPATWTFNVAGLIGATPELLVGVQDGVVRSRVLAGTYQVRDDAQAELAQARQQLAGAKDSQEHVYATRSLEECLRPYSSDLHVDEQPYLLTLPNVIHLASDAHGTLDSPSGRPEDRPSIIDLAKSIHPTAAVGGVPRNEAMREIARIERADRGRYAGPVGWIDGAGNGQLGIALRCGQLESRTRIRLWAGGGIMPDSDPQSELAESWAKLGPMLQAHGLSRP

SEQ ID NO: 93524 - protein, 460 aa, Brevibacterium sp.
  REGION 1..460: note = tr|A0A2H1IPQ4|A0A2H1IPQ4_9MICO Isochorismate synthase OS=Brevibacterium sp. Mu109 OX=1255669; GN = BSP109_01376 PE=4 SV=1
MPHTSAPSASTPRLTVRSWFVDGLTPDAPPPFSGNIPTSSLDFLTQLPTSGFACWVRGRSGLVGIGRRLRLRARGEDRFHDLARQWDELVAAAEVDDRVALMGSGLVGFSAIAFAADSGVDSVIDVPEYILGRRDGRVWLTHVGGDEDPTQPAAQSDELIAGLQLTPTPLRDQRIVSRAPGHVSPERFEEIVALAASRLRSPEAGERKIVLARDEVITAEDDIDVRTALGRLNAEFPSTWTFLVAGLVGATPELLIGVEDGAVHSRVLAGTYRVQDDPEKEVARARAHLGGRKDSVEHSYAIDSLASTLGPVTEELHVDPEPHLLQLANVIHLASDAHGRLSTRADGSRISPFEVAHAVHPTAAVGGTPRARAMDLISQFEEMDRGRYAGPVGWVDGYGNGQFGIALRCGQLEERNRIRLFAGAGIMPDSEPESERRETDAKFAPMRSALGVDWSPDTSH

SEQ ID NO: 93525 - protein, 460 aa, unidentified
  source 1..460: note = Brevibacterium yomogidense
  REGION 1..460: note = tr|A0A1X6XJH9|A0A1X6XJH9_9MICO Menaquinone-specific isochorismate synthase OS=Brevibacterium yomogidense; OX = 946573 GN=FM105_09390 PE=4 SV=1
MPHTSAPSASTPRLTVRSWFVDGLTPDAPPPFAGNIPTSSLDFLTQLPTSGFACWVRGRSGLVGIGRRLRLRARGEDRFHDLARQWDELVAAAEVDDRVALMGSGLVGFSAIAFAADSGVDSVIDVPEYILGRRDGRVWLTHVGGDEDPTQPAAQSDELIAGLQLTPTPLRDQRIVSRAPGHVSPERFEEIVALAASRLRSPEAGERKIVLARDEVITAEDDIDVRTVLGRLNAEFPSTWTFLVAGLVGATPELLIGVEDGAVHSRVLAGTYRVQDDPEKEVARARAHLGGRKDSVEHSYAIDSLASTLGPVTEELHVDPEPHLLQLANVIHLASDAHGRLSTRADGSRISPFEVAHAVHPTAAVGGTPRARAMDLISQFEEMDRGRYAGPVGWVDGYGNGQFGIALRCGQLEERNRIRLFAGAGIMPDSEPESERRETDAKFAPMRSALGVDWSPDTSH

SEQ ID NO: 93526 - protein, 415 aa, Brevundimonas diminuta
  REGION 1..415: note = tr|A0A1R4G8J8|A0A1R4G8J8_BREDI Isochorismate synthase of siderophore biosynthesis OS=Brevundimonas diminuta 3F5N OX=1255603 GN=FM111_10435 PE=4 SV=1
MESRVAEFWGAPDLSVQIGGGASERHDAVAPKGGADWAFGLSTPELRLFTTGLKQRLTPGPATTLGERVRRFFADLPVAPETDEPSPRLLVGALPFDRNADDCLFLPERAANRIWDMPSTASRPSILALTPEPSRAAYEAAVTQALAAMRASQGGAEPVDKVVLSRSLKVQGDGAIDPFALWRDLKADPTAARFLTPLGAGQGGAMRRLVGATPELLASKRGPAVFSHPLAGSARRSTDVVQDEAAAQSLLASDKDRREHALVVEAIMDLLAPYCSDLRAPPGPALVSTRTMWHLGTRIEGRLHRPDEVSAAELAALLHPTPAVCGSPRDQAAEMIHALEGYDRGFYAGAVGWTNAFGDGAWYVSLRCAETCGDQARLYAGAGIVEGSDPAAEADETSGKFQAVLRALGVDEASV

SEQ ID NO: 93527 - protein, 427 aa, Brevundimonas naejangsanensis
  REGION 1..427: note = tr|A0A4P7BT74|A0A4P7BT74_9CAUL Isochorismate synthase OS=Brevundimonas naejangsanensis OX=588932; GN = E3U41_07695 PE=4 SV=1
MICNSLSAAGISMELRVAEFWGAPDLSVQIGGGASERQEAAAPKDDMDWAFGLSTPELRLFTTGLRQRLTPGPAATLGARVRGFFADLPVPPETDEPSPRLLVGALPFDRRADDCLFLPERAANRIWDMRSSAPRPSIRALTPEPSRAAYEAAVTQALAAMRASHGGAEPINKVVLSRSLKVQGDGAIDPFALWRDLKADPTAARFLTPLGKGSRGAMRRLVGATPELLVSKRGPAVFSHPLAGSARRSVDVVQDEAAAQSLLASDKDRREHALVVEAIMDLLAPYCSDLRAPPGPALVSTRTMWHLGTRIEGRLHRPDETSAAELAALLHPTPAVCGSPRDRAAEIIHALEGYDRGFYAGAVGWTNAFGDGAWYVSLRCAETCGDQARLYAGAGIVEGSDPAAEADETSGKFQAVLRALGVDEASV

SEQ ID NO: 93528 - protein, 431 aa, Brevundimonas sp.
  REGION 1..431: note = tr|A0A399ULI3|A0A399ULI3_9CAUL Isochorismate synthase OS=Brevundimonas sp. LPMIX5 OX=2305887; GN = D1604_04640 PE=4 SV=1
MICNSLSAAGTSMESRVAEFWGAPDLSVQIGGGASERQEVAAPKDDMDWAFGLTTPELRLFTTGLKQRLTPGPAATLGARVRRFFADLPVAPETDEPSPRLLVGALPFDRKADDCLFLPERAANRIWDMPSSASHPSIRALTPEPSRAAYEAAVTQALEAMRASQGGAEPVDKVVLSRSLKVQGDGAIDPFALWRDLKADPTAARFLTPLGEGQKTGQGGAMRRLVGATPELLASKRGPVVFSHPLAGSARRSTDVVQDEAAAQSLLASDKDRREHALVVEAIMDLLAPYCSDLRAPPGPALVSTRTMWHLGTRIEGRLHRPDETSAAELAALLHPTPAVCGSPRDRAAEMIHALEGYDRGFYAGAVGWTNAFGDGAWYVSLRCAETCGDQARLYAGAGIVEGSDPAAEADETSGKFQAVLRALGVDEASV

SEQ ID NO: 93529 - protein, 415 aa, Brevundimonas vancanneytii
  REGION 1..415: note = tr|A0A4P1KEX0|A0A4P1KEX0_9CAUL Isochorismate synthase dhbC OS=Brevundimonas vancanneytii OX=1325724; GN = dhbC PE=4 SV=1
MESRIAEFWGAPDLSVQIGGGASERHEAAAPKDDMDWAFGLSTPELRLFTTGLKQRLTPGPAATLGERVRRFFADLPVAPETDEPSPRLLVGALPFDRSADDCLFLPERAANRIWDMPSGAHRPAIRALTPEPSRAAYEAAVTQALEAMRASQGGAEPVDKVVLSRSLKVQGDGAIDPFALWRDLKADPTAARFLTPLGQGQGGAMRRLVGATPELLASKRGPAVFSHPLAGSARRSTDVVQDEAAAQGLLASDKDRREHALVVEAIMDLLAPYCSDLRAPPGPALVSTRTMWHLGTRIEGRLHRPDETSAAELAALLHPTPAVCGSPRDRAAEMIHALEGYDRGFYAGAVGWTNAFGDGAWYVSLRCAETCGDQARLYAGAGIVEGSDPAAEADETSGKFQAVLRALGVDEASV

SEQ ID NO: 93530 - protein, 491 aa, Brochothrix thermosphacta
  REGION 1..491: note = tr|A0A2X0QK95|A0A2X0QK95_BROTH Putative menaquinone-specific isochorismate synthase MenF; OS = Brochothrix thermosphacta OX=2756 GN=BTBSAS_240019 PE=4; SV = 1
MRSNSFSLFIWSIYIGAIYLMKLANKVTESIKQAVEQARKTENAVLLSIITPIEEINFPKVLINLPQTEDAFYWQTPDDSLEFTGIKTAAVFNEKMMSATGVQQEWSQLLKDAVISDQDKANSGLPLLFGGFSFDDKAETTGTIWSVFGKQLFLLPELMFMRKEKLNTLTINCIVQADDTFMSIEKKLNNSYAQARTLNITSEKERTPLIIKKIEDLITPTDWDKMLNKGIEHIEAGVFTKVVLARQKEIVFNRSLHIGELMAALLLQQPNCYRYLLRYQGTSFLGASPERLLYKEGQSIYSAGVAGSIAAGKTEEQRQMYADELLADPKNLHEHEIVVSMITNKLAGLCHDLNYSSQPQILSNRDIQHLYTPIKAELNSGMSFLTLVKQMHPTPALGGFPSKKTVEWIAKEEPLIRGFFGAPIGWYDSNENGEFAVGIRSLAAQEKTARLFAGCGIVADSVPENEWHETAMKFQPMLRLLGGTDNDTASN

SEQ ID NO: 93531 - protein, 391 aa, unidentified
  source 1..391: note = Brucella abortus
  REGION 1..391: note = tr|Q2YL94|Q2YL94_BRUA2 Isochorismate synthase:Anthranilate synthase component I and chorismate binding protein OS=Brucella abortus (strain 2308); OX = 359391 GN=BAB2_00 15 PE=4 SV=1
MRTSALKYPTSDADHLIENNTYFSFSSGNLKLAASGMREVIATPAIGGSNPDSTFQRAIAQAFERAARAGQRNPIVVGAIPFDPGEPSCLYVPEEMDWQEREPASGASAAAMPQLAGQRSVPDEAGFKHAVEHAIINFRLSDVRKAVLSVMRELTFADDIDVDAMLANLRAQNHDGYQFRVPLPGGGALVGVSPELLIHKDKGKIVSNPLAGSAKRMADPEADRKNADRLAKSEKDHYEHRLVIEDIRARLQPICTELDIPERPSLIHTAALWHLSTRIEGRLHDPDMTALQLACLIHPTPAVCGFPTERARRLIRFVEPFERGLFTGMVGWSDAEGNGEWVVTIRCGTVKGNLVRLFAGAGIVEASSPDSEWAEVQTKLGTMLRACGLSA

SEQ ID NO: 93532 - protein, 391 aa, Brucella melitensis
  REGION 1..391: note = tr|A0A4P6KQE3|A0A4P6KQE3_BRUML Isochorismate synthase OS=Brucella melitensis OX=29459 GN=EXD79_11095; PE = 4 SV=1
MRTSALKYPTSDADHLIENNTDFSFASGNLKLAASGMREVIATPAIGGSNPDSTFQRAIAQAFERAARAGQRNPIVVGAIPFDPGEPSCLYVPEEMDWQEREPASGASAAAMPQLAGQRSVPDEAGFKHAVEHAIINFRLSDVRKAVLSVMRELTFADDIDVDAILANLRAQNHDGYQFRVPLPGGGALVGVSPELLIHKDKGKIVSNPLAGSAKRMADPEADRKNADRLAKSEKDHYEHRLVIEDIRARLQPICTELDIPERPSLIHTAALWHLSTRIEGRLHDPDMTALQLACLIHPTPAVCGFPTERARRLIRFVEPFERGLFTGMVGWSDAEGNGEWVVTIRCGTVKGNLVRLFAGAGIVEASSPDSEWAEVQTKLGTMLRACGLSA

SEQ ID NO: 93533 - protein, 391 aa, Brucella microti
  REGION 1..391: note = tr|C7LGM0|C7LGM0_BRUMC Isochorismate synthase; OS = Brucella microti (strain CCM 4915) OX=568815 GN=entC; PE = 4 SV=1
MRTSALKYPTSDADHLIENNTDFSFASGNLKLAASGMREVIATPAIGGSNPDSTFQQAIAQAFERAARAGQRNPIVVGAIPFDPGEPSCLYVPEEMDWQEREPASGASAAAMPQLAGQRSVPDEAGFKHAVEHAIINFRLSDVRKAVLSVMRELTFADDIDVDAMLANLRAQNHDGYQFRVPLPGGGALVGVSPELLIHKDKGKIVSNPLAGSAKRMADPEADRKNADRLAKSEKDHYEHRLVIEDIRARLQPICTELDIPERPSLIHTAALWHLSTRIEGRLHDPDMTALQLACLIHPTPAVCGFPTERARRLIRFVEPFERGLFTGMVGWSDAEGNGEWVVTIRCGTVKGNLVRLFAGAGIVEASSPDSEWAEVQTKLGTMLRACGLSA

SEQ ID NO: 93534 - protein, 391 aa, unidentified
  source 1..391: note = Brucella neotomae
  REGION 1..391: note = tr|A0A381BZZ8|A0A381BZZ8_BRUNE Isochorismate synthase OS=Brucella neotomae OX=29460 GN=entC PE=4 SV=1
MRTSALKYPTSDADHLIENNTDFSFASGNLKLAASGMREVIATPAIGGSNPDSTFQRAIAQAFERAARAGQRNPIVVGAIPFDPGEPSCLYVPEEMDWQEREPASGASAAAMPQLAGQRSVPDEAGFKHAVEHAIINFRLSDVRKAVLSVMRELTFADDIDVDAMLANLRAQNHDGYQFRVPLPGGGALVGVSPELLIHKDKGKIVSNPLAGSAKRMADPEADRKNADRLAKSEKDHYEHRLVIEDIRARLQPICTELDIPERPSLIHTAALWHLSTRIEGRLHDPDMTALQLACLIHPTPAVCGFPTERARRLIRFVEPFERGLFTGMVGWSDAEGNGEWVVTIRCGTVKGNLVRLFAGAGIVEASSPDSEWAEVQTKLGTMLRACGLSA

SEQ ID NO: 93535 - protein, 391 aa, unidentified; identical to SEQ ID NO: 93534
  source 1..391: note = Brucella ovis
  REGION 1..391: note = tr|A0A0H3AVE0|A0A0H3AVE0_BRUO2 Isochorismate synthase OS=Brucella ovis (strain ATCC 25840 / 63/290 / NCTC 10512) OX=444178 GN=entC PE=4 SV=1

SEQ ID NO: 93536 - protein, 389 aa, Brucella sp.
  REGION 1..389: note = tr|E2PLR6|E2PLR6_9RHIZ Isochorismate synthase; OS = Brucella sp. BO2 OX=693750 GN=BIBO2_0999 PE=4 SV=1
MSALKYPTSDADHLIENNTDFSFASGNLKLAASGMREVIVTPAIGGSDPDSTFQRAIAQAFERAARAGQRNPTVVGAIPFDPGEPSCLYVPEEMEWQEREPASGASTSAMPQLAGQRSVPDEAGFKHAVEHAIINFRLSDVRKAVLSVMRELTFADDIDVDAMLANLRAQNHDGYQFRVPLPGGGALVGVSPELLIHKEKGKIVSNPLAGSAKRMADPEADRKNADRLAKSEKDHYEHRLVIEDIRARLQPICTELDIPERPSLIHTAALWHLSTRIEGRLHDPDMTALQLACLIHPTPAVCGFPTERARRLIRFVEPFERGLFTGMVGWSDAEGNGEWVVTIRCGTVKGNLVRLFAGAGIVEASSPDSEWAEVQTKLGTMLRACGLSA

SEQ ID NO: 93537 - protein, 391 aa, unidentified
  source 1..391: note = Brucella suis
  REGION 1..391: note = tr|A0A4Z0EY12|A0A4Z0EY12_BRUSS Isochorismate synthase OS=Brucella suis OX=29461 GN=E4658_14335 PE=4 SV=1
MRTSALKYPTSDADHLIKNNTDFSFASGNLKLAASGMREVIATPAIGGSNPDSTFQRAIAQAFERAARAGQRNPIVVGAIPFDPGEPSCLYVPEEMDWQEREPASGASAAAMPQLAGQRSVPDEAGFKHAVEHAIINFRLSDVRKAVLSVMRELTFADDIDVDAMLANLRAQNHDGYQFRVPLPGGGALVGVSPELLIHKDKGKIVSNPLAGSAKRMADPEADRKNADRLAKSEKDHYEHRLVIEDIRARLQPICTELDIPERPSLIHTAALWHLSTRIEGRLHDPDMTALQLACLIHPTPAVCGFPTERARRLIRFVEPFERGLFTGMVGWSDAEGNGEWVVTIRCGTVKGNLVRLFAGAGIVEASSPDSEWAEVQTKLGTMLRACGLSA

SEQ ID NO: 93538 - protein, 90 aa, Budvicia aquatica
  REGION 1..90: note = tr|A0A484ZVM9|A0A484ZVM9_9GAMM Menaquinone-specific isochorismate synthase OS=Budvicia aquatica OX=82979; GN = menF_1 PE=4 SV=1
MMRMDDSRAFLGSSPECLFLRIGNQLKTEALAGTVSGSPDNQKAKELGDWLMQDKKNQHENLLVVDDICQRLQGGTLAIDVLPAEIVRAA

SEQ ID NO: 93539 - protein, 394 aa, Burkholderia ambifaria
  REGION 1..394: note = tr|A0A2S9N6U4|A0A2S9N6U4_9BURK Isochorismate synthase OS=Burkholderia ambifaria OX=152480; GN = C6Q14_31680 PE=4 SV=1
MNAISRPDELLVPHSVWDVYRADTPLFLATPAHTLLVCDVAEAIPHANAPLAARVNDALQRARADGHAGAAVVGAVPFDVDAPAVLRVARTMLRARPLGAQRAAVRAGTRYATREVPAADAYADAVAQAVARIRAGELDKVVLARTLEATGDAPVDVAALVARLASCNPHGYTFSVDLGAGRTLLGASPELLVNRFGSVVRANPLAGSAPRSRDPVEDQRRAQALLASAKDLDEHRVVVEAVRDNLAPLCRRLDVPARPSLVQTETMWHLSTEVCGETDADALTLALALHPTPAVCGAPRAAARDCIRDAEPFDRGFYAGMLGWVDARGDGEWVVTIRCAEAFDRTLRLYAGAGVVGESTPDGERAETAAKFRTMLDALGIDRDAATGAAREFA

SEQ ID NO: 93540 - protein, 477 aa, Burkholderia anthina
  REGION 1..477: note = tr|A0A3P0C0W6|A0A3P0C0W6_9BURK Isochorismate synthase OS=Burkholderia anthina OX=179879 GN=DF034_25920; PE = 4 SV=1
MTAGLPLLHDTFARAARRAAATGTPTLASVSVPLRALDFFDLIAAWDDGVTPWCFHEAGDASVTLFGWDCALELSAAGDTRFAQIDARWRTLVRDAVTAGPQPPRLVGGFRFDSRGPRSAHWSPFADASMTLAKLLIVREGDAHWAVCQQVVSAHDDPAALAHACLARIDSLGALAPAAEDEAPQLLHTQALQASEWQHEVRRAVDAIHDGAFGKVVLARDVLEQYARPVAIAPLLRRLRRRDPHAHLFAVRRAGACFVGATPERLARVAAGDVRTHALAGTIRRGATPDADRALGAALMACAKERLEHALVVDAIRAALAPLSRTLDVPDRPSLHRLPKLQHLSTPIRATLNADATLLQVVAALHPTPAVAGHPRAAALDHIRAHEGFDRGWYAAPLGWIDAHGNGDFIVALRSALVAGGACRLFAGCGIVADSEPTNEYQETELKLSGMRAAIRVRDTAATVRGRTPASASSTVD

SEQ ID NO: 93541 - protein, 477 aa, Burkholderia cenocepacia
  REGION 1..477: note = tr|A0A109DZP9|A0A109DZP9_9BURK Isochorismate synthase OS=Burkholderia cenocepacia OX=95486; GN = AS149_15505 PE=4 SV=1
MNAGLPLLHDTFARAARRAAATGTATLASVSVPLRPLDFFDLIAAWDDGVTPWCFHEAGDASVTLFGWDCAVELRATGDTRFAQIDARWRTLVRDAVTAGPQPPRLVGGFRFDSQGPRSAHWAPFPDASMTLARLLIVREGDAYWAVCQQVVAAHDDPAALAHACLARIESLGALAEAAEDDPPQLLHTQALRASEWQHEVRRAVDAIRDGAFGKVVLARDVLERYARPVAIAPLLRRLRRRDAHAHLFAVRRDGACFVGATPERLARVAAGDVRTHALAGTIRRGATPDDDRALGAALMASAKERLEHALVVDAIRAALAPLARTLDVPDQPSLHRLPKLQHLSTPIRAALNADASLLQVVAALHPTPAVAGHPRAPALDHIRAHEGFDRGWYAAPIGWIDAHGNGDFIVALRSALVAGGACRLFAGCGIVAESEPGNEYQETELKLSGMQAAIRVRDAAAQTRGRTQMSASSMVD

SEQ ID NO: 93542 - protein, 477 aa, Burkholderia cepacia
  REGION 1..477: note = tr|A0A095EB88|A0A095EB88_BURCE Isochorismate synthase family protein OS=Burkholderia cepacia OX=292; GN = DM42_5759 PE=4 SV=1
MNAGLPLLHDTFARAARRAAATGTPTLASVSVPLRPLDFFDLIAAWDDGATPWCFHEAGDASVTLYGWDCAAELSATGDTRFAQIDARWRALVRDAVTAGPQPPRLVGGFRFDAQGPRSAHWASFPDASMTLAKLLIVREGDAHWAVCQQVVAAHDDPAALAHACLARIESLGTLAPAAEDDAPQLLHTQALQASEWQHEVRRAVDAIHDGAFGKVVLARDVLEQYARPVAIAPLLRRLRRRDAHAHLFAVRRDGACFVGATPERLARVAAGDVRTHALAGTIRRGATPDDDRALGAALMASAKERLEHALVVDAIRAALAPLSRELDVPDQPSLHRLPKLQHLSTPIRATLNAEATLLQVVAALHPTPAVAGHPRAPALDHIRAHEGFDRGWYAAPIGWIDAHGNGDFIVALRSALIAGGACRLFAGCGIVADSEPVNEYQETELKLSGMRAAIRVREAAAERPGRTQASASSMVD

SEQ ID NO: 93543 - protein, 479 aa, Burkholderia contaminans
  REGION 1..479: note = tr|A0A2S5E680|A0A2S5E680_9BURK Isochorismate synthase OS=Burkholderia contaminans OX=488447; GN = C3743_10505 PE=4 SV=1
MNAGLPLLHDTFARAARRAADTGTPTLASVSVPLRPLDFFDLIAAWDDGATPWCFHEAGDASVTLFGWDGVLELTATGDTRFAQIDARWRTLVRDAVMAGPQPPRLVGGFRFDSHGPRSTHWAPFPDASMTVAKLLIVREGDAHWAVCQHIVAAHDDPAALAHACLARIESLGTLAAAHDDDAPHLLHTQALQASEWQHEVRRAVDAIHGGAFGKVVLARDVLEQYARPVAIAPLLRRLRKRDAHAHLFAVRRDGACFVGATPERLARVAAGDVRTHALAGTIRRGATPDDDRALGAALMDSAKERLEHALVVDAIRAALAPLSRTLDVPEQPSLHRLPRLQHLSTPIRATLKADATLLQVVAALHPTPAVAGHPRAEALDHIRAHEGFDRGWYAAPVGWIDAHGNGDFIVALRSALVDGGACRLFAGCGIVADSEPANEYQETELKLSGMQAAIRMRDAAADADARGPATMSASSTVE

SEQ ID NO: 93544 - protein, 394 aa, Burkholderia lata
  REGION 1..394: note = tr|A0A3G3HBH3|A0A3G3HBH3_BURL3 Isochorismate synthase OS=Burkholderia lata (strain ATCC 17760 / DSM 23089 / LMG 22485 / NCIMB 9086 / R18194 / 383) OX=482957; GN = CVS37 _11210 PE=4 SV=1
MNAISRPSDLLAPQNIWDLYRADAALFLATPAHTLLAADPAEAIPHADTPLAERVARALRHAQAQGHAGAAVVGAVPFDADAPAALRVAHTMLRAAPRGAPRAPELTGMRYATREVPAADAYADAVAHAVARIRAGELDKVVLARTLEVVGEQPVEVAPLVARLAARNPHGYTFSVDLGEGRTLLGASPELLVNRFGGIVRANPLAGSAPRSRDPIEDRRRAEALLDSVKDLDEHRVVVEAVRDSLAPYCRHLDVPARPSLMHTETMWHLSTEVRGETDADALTLALALHPTPAVCGAPRDAARACIRAAEPFDRGFYAGMLGWVDARGDGEWIVTIRCAQAFDRTLRLYAGAGVVAESTPDGERAETAAKFRTMLDALGIRHDAASGGAREAA

SEQ ID NO: 93545 - protein, 394 aa, Burkholderia multivorans
  REGION 1..394: note = tr|A0A2S9M2T4|A0A2S9M2T4_9BURK Isochorismate synthase OS=Burkholderia multivorans OX=87883; GN = C6Q15_33710 PE=4 SV=1
MNAIPRLSELLASHNVWELYRTDTPLFLATPAHTLLAIDVADAIPHTDAPLAARVNDALRRARAEGQAGAAVVGAVPFDVDAPAALRVARTLLRARPLDAPQVPEPVGTRYATYELPSADVYADAVARAVASIRAGELDKVVLARTLEVTGERPVDVATLVARLASRNPRGYTFSVDLGAGRTLLGASPELLVNRFGGIVRANPLAGSAPRSRDPVEDERRARALLASAKDLAEHRVVVDVVRQGLAPLCRRLEVPERPSLIQTETMWHLSTEVRGETDADALTLALALHPTPAVCGAPRAAARDIIGDAEPFDRGFYAGMLGWVDTHGDGEWVVTIRCAEAFDRTLRLYAGAGVVGESTPEGERAETAAKFRTMLDALGIDRVAASDAAREAA

SEQ ID NO: 93546 - protein, 475 aa, Burkholderia oklahomensis
  REGION 1..475: note = tr|A0A381IDW7|A0A381IDW7_9BURK Isochorismate synthase dhbC OS=Burkholderia oklahomensis OX=342113; GN = dhbC PE=4 SV=1
MSARLSVLRDTFARAARQAAETGEPVLASASFPLRPLNLFDLIASWDDAITPWFFHETGDPSVALFGWDRAFELSATGDARFAQLDARWRALGRTAVIAGPQPPRIGGGFRFDPHGPRQAHWQSFADASMMLAKVMIVREGDAYWAVCQHVVAAHDDPAALARERIARLDMLATLAPAPDDDAPHLLRTQALQAGEWQGKVRRAVAAIRRDELSKVVLARDVQQQYAQPVAIGALLRRLRRRDAHAHLFAIRNGDGCFVGATPERLARVADGKAQTHALAGTIRRGADPDSDRALGAELMASAKERLEHALVVDAIRGALAPLSRTIDVPAQPSLQRLPRLQHLSTPIGATLNADATLLQVVAALHPTPAVAGHPRAIALEHIRAHEGFDRGWYAGPIGWIDAHGNGDFVVALRSALIAGRACRLFAGCGIVADSEPEREYQETNLKLSGMQAAIELCDIADNLRKVASIPSASR

SEQ ID NO: 93547 - protein, 489 aa, Burkholderia plantarii
  REGION 1..489: note = tr|A0A0B6RMM2|A0A0B6RMM2_9BURK Salicylate biosynthesis isochorismate synthase PchA OS=Burkholderia plantarii OX=41899 GN=pchA PE=4 SV=1
MSTSATTPSETLAKALGVPLADAFTDVLAGAFTRAARQAAASGAPVLASVSFPLKPLDLPALIGRWDDGVTPWAFHETVTPSFALFGWDCALELSGHGDARFAQIDARWRELVRTGIVCGDQPPRLVGGFRFDPAAARQAHWQAFADASMMLPRLSVVRERGDHWLVCQHVAAPDDDGAAVARRYEAWIGRLDNAMPVSAPASGRGASGALDTATLDAGVWKRKVRDATDAIRHGAFSKVVLARDVPRRYPAPVAIAPLLARLRRRDANAQLFAARRGDGCFVGATPERLVRVHERLVHTQALAGTTRRDADPDRDRTLGAELMADRKERLEHAIVVEAIVAALAPHTHDLQLPDRPVLQLLPRLQHLSTPIRATLDAGATPLALVAALHPTPAVAGHPRAAALAWLRMVEGFDRGWYAGPFGWIDAHGNGDFCVALRCALIVANTCRLFAGCGIVAESDPEREYQETALKLSGMQAAIESPEDSPTPG

SEQ ID NO: 93548 - protein, 484 aa, Burkholderia pseudomallei
  REGION 1..484: note = tr|A0A0E1S129|A0A0E1S129_BURPE Salicylate biosynthesis isochorismate synthase (Isochorismate mutase); OS = Burkholderia pseudomallei 305 OX=425067 GN=pchA PE=4; SV = 1
MSARLSALLDTFARAARRAADTGEPVLAAASFPLRPLNLFDLIASWDDGATPWCFVEAGDEPGAMRAPGKPPALFGWDCALDLNEAGDARFARLDARWRALVRAAVVTGAQPPRIVGGFRFDPLGPRYAHWHAFADASMTLAKLLVVREGEAYWAVCQRVVAAHDDPAALARECDARIGMLASLAPAADDEAPRLLRVQALQAAAWQHEVRRAVDAIRGEAFSKVVLARDVLQQYARPVAIGPLLRRLRRRDPRAHLFAIRRRDGCFVGATPERLARVAHGRAHTHALAGTIARGNDPAHDRALGAQLMASAKERLEHALVVDAIRDALAPLSRAIDVPAQPSLLRLPRLQHLSTPIAAALNERATLLQVVAALHPTPAVAGHPRAAALEHIRAHEGFDRGWYAGPIGWIDAHGNGDFVVALRSALISAGACRLFAGCGIVAESEPAREYRETGLKLSGMQAAIEARDAAAAARTVEPIPSAAH

SEQ ID NO: 93549 - protein, 394 aa, Burkholderia pyrrocinia
  REGION 1..394: note = tr|A0A4R4FVC8|A0A4R4FVC8_BURPY Isochorismate synthase OS=Burkholderia pyrrocinia OX=60550; GN = EVG18_19825 PE=4 SV=1
MNAISRPDELLVPHNVWDVYRADAPLFLATPAHTLLACDVAAAIPHADAPLAARVNDALLRERADGHMGAAVVGAVPFDVGAPAALRVARTMLRARPLGALRAAGPAGTRYATREVPSADAYADAVAQAVARIRAGELDKVVLARTLEATGDAPVDVAALVTRLASCNPHGYTFSVDLGGGRTLLGASPELLVNRFGGIVRANPLAGSAPRSRDPVEDRRRAQALLASAKDLDEHRVVVEAVRDSLAPLCRRLDVPARPSLVHTETMWHLSTEVCGETDADVLTLALALHPTPAVCGAPRTAARDCIRDAEPFDRGFYAGMLGWVDVHGDGEWVVTIRCAEAFDRTLRLYAGAGVVAESTPDGERAETAAKFRTMLDALDIDRDAASGAAREAA

SEQ ID NO: 93550 - protein, 483 aa, unidentified
  source 1..483: note = Burkholderia reimsis
  REGION 1..483: note = tr|A0A365QYQ0|A0A365QYQ0_9BURK Isochorismate synthase OS=Burkholderia reimsis OX=2234132 GN=DPV79_10475; PE = 4 SV=1
MNAGLPLLHDTFARAARRAADTGTPTLASVSVPVRPLDFFDLIAAWDDGATPWFFHEAGDTSVTLFGWGNALELTATGDTRFAQIDARWRTLVRDAVTAGPQPPRAVGGFRFDPRGARSAHWAPFPDASMTVATLLIVREGDAHWAVCQHVVAAHDDPAALAHACLARIESLGSLAAARDDAAPHLLHTQALQASEWQHEVRRAVDAIHGGAFGKVVLARDVLEQYARPVAIAPLLRRLRKRDAHAHLFAIRREGACFVGATPERLARVAAGDVRTHALAGTTRRGATPDDDRALGAALMASAKERLEHALVVDAIRAALTPLSRALDVPAEPSLHRLPRLQHLSTPIRATLKEDATLLQVIAALHPTPAVAGHPRDAALDHIRAHEGFDRGWYAAPVGWIDAHGNGDFIVALRSALVDGGACRLFAGCGIVADSEPVNEYQETELKLSGMQAAIRVRDVEAGVEAASDAHDPARVSASSTVE

SEQ ID NO: 93551 - protein, 395 aa, unidentified
  source 1..395: note = Burkholderia singularis
  REGION 1..395: note = tr|A0A238HC22|A0A238HC22_9BURK Isochorismate synthase of siderophore biosynthesis OS=Burkholderia singularis OX=1503053 GN=BSIN_2634 PE=4 SV=1
MSTLSNPEFYSDIQNIADAYRTATPFLFATPRYTLIAQDIVEAVPHSGEPLGARVRRALSHAREQGRGGAAVVGAVPFDVERPAALRVVGSMSRGNPLTGVRASLPAHDRYVTRAVPPGAEYASAVAQAVADIRAGRLDKVVLARTLELTGEHPVDVGALVERLAACNPHGYTFSVDLGDARTLVGASPELLVSRFGGVLRANPLAGSAPRSNDPVEDRRRADALLESTKDLDEHRVVVDAVKESLAPFCKQLAVPARPSLVHTRTMWHLSTEVVGETDADALTLALALHPTPAVCGYPRSGAREAILRAEPFDRSFYTGMLGWVDTRGDGEWVVTLRCAETHGETLRLFAGAGIVGDSSPDAELAETAAKFRTMLDAIGVDRAVAIDSTMEVPA

SEQ ID NO: 93552 - protein, 475 aa, Burkholderia sp.
  REGION 1..475: note = tr|A0A3N8BDV7|A0A3N8BDV7_9BURK Isochorismate synthase OS=Burkholderia sp. Bp9126 OX=2184570; GN = DIE19_30065 PE=4 SV=1
MSARLPLLVDAFTQAARRAAATGEPVLAAVSFPLPPLDLFDLVAHWDDGVTPWTFHETGEPSVALFGWDCAHALRATGDTRFAALDARWHALVRAAVCAGPQPARAIGGFRFDPHAPRQPHWASFGDASLTLAKLLIVREGDAYWAVCQHVVAAHDDPVALARERDTRLAQLASLPAAPDDDAPRMLYTQALPAAEWQRRARRAVDAIRRGTLSKVVLARDVLLQVAQPVRIGPLLKRLRRRDPHAHLFAIREPGGCFVGATPERLARVADGRVQTHALAGTTPRGDDPASDRALGDALLACAKERHEHALVVDAIRDALAPLSAALDVPAQPMLHRLPRLQHLSTPIGGPLDAGVTPLRVVAALHPTPAVAGHPRADALAHIRAHEGFDRGWYAGPIGWIDSRGNGDFVVALRSALISEGACRLFAGCGLVADSEPEREYQETSLKLTSMQAAILQRERADALCTVAPLRVRAT

SEQ ID NO: 93553 - protein, 394 aa, Burkholderia stabilis
  REGION 1..394: note = tr|A0A4Q2AM42|A0A4Q2AM42_9BURK Isochorismate synthase OS=Burkholderia stabilis OX=95485 GN=D1006_00130; PE = 4 SV=1
MNAISRPDQLLVPHNVWDVYRADTPLFLATPAHTVLACDVAEAIPHADAPLAARVNDALRRARADGHVGATVVGAVPFDVGAPTALRVARTMLRARPLGARRAAGPAGTRYATREVPSADAYADAVAQAVARIRAGELDKVVLARTLEATGEVPVDVAALVARLASCNPHGYTFSVDLGAGRTLLGASPELLVNRFGGVVRANPLAGSAPRSRDPVEDRRRAQALLASAKDLDEHRVVVEAVRDSLAPLCRRLDVPARPSLVHTETMWHLSTEVCGETDADALTLALALHPTPAVCGAPRAAARDCIRDAEPFDRGFYAGMLGWVDAHGDGEWVVTIRCAEAFDRTLRLYAGAGVVGESTPEGERAETAAKFRTMLDALGIDRDAASGAAREAA

SEQ ID NO: 93554 - protein, 394 aa, unidentified
  source 1..394: note = Burkholderia stagnalis
  REGION 1..394: note = tr|A0A3P0GFF6|A0A3P0GFF6_9BURK Isochorismate synthase OS=Burkholderia stagnalis OX=1503054; GN = DF145_07140 PE=4 SV=1
MNMVSRPSTLLAPRNVWELYRPDTPLFLATPDHALLAADAAQAVPHGDAPLAARVAQALRDARASGYADAAVVGAVPFDVDAPAALRVARTLLRAGPLGSPHAPDPASTRYATRAVPSADRYADAVAQAVARIRAGELDKVVLARTLEITGERPVDVAPLVARLAARNPHGYTFSVDLGAGRTLLGASPELLVNRFGGIVRANPLAGSAPRSPDPVEDRRRADALLASVKDLDEHRVVVEAVRDSLAPLCRRLDVPARPSLIHTETMWHLSTEVRGETDADALTLALALHPTPAVCGAPRAAARACIRDAEPFDRGFYAGMLGWVDTHGDGEWVVTIRCAEARDRTLRLYAGAGVVGESTPDGERAETAAKFRTMLDALGVSRDVAADALTERA

SEQ ID NO: 93555 - protein, 481 aa, Burkholderia thailandensis
  REGION 1..481: note = tr|Q2T472|Q2T472_BURTA Isochorismate synthase family protein, putative OS=Burkholderia thailandensis (strain ATCC 700388 / DSM 13276 / CIP 106301 / E264) OX=271848 G; N = BTH_II1833 PE=4 SV=1
MNARFSVLLDTFARAARRAADTGEPVLAAASFPLRPLKLFDLIASWDDGATPWCFVEAGDEPGAPDRPAALFGWDCALDLNEPGDARFARLDARWRALARAAVVAGPQPPRIVGGFRFDPRGPRHAHWQAFPDASLTLAKMLIVREGDAYWAVCQRVVSAHDDCAALARECDARIGMLAALAPAIDDDAPRLLHVHALQAAEWQHKARRAVDAIRRDAFSKVVLARDVLQQYAQPVAIGPLLRRLRLRDARAHLFAVRRREGCFVGATPERLVRVAHGHAQTHALAGTIARGDDRDHDRALGAQLMASAKERLEHALVVDAIRDALAPLSRTIDVPAEPSLLRLPRLQHLSTPIAATLNADATLLQAVAALHPTPAVAGYPRAAALEHIRAHEGFDRGWYAGPIGWIDAHGNGDFVVALRSALISAGACRLFAGCGIVAESEPAREYRETNLKLSGMRAAIEARDAAANLRTVAPMPAAAH

SEQ ID NO: 93556 - protein, 390 aa, Burkholderia ubonensis
  REGION 1..390: note = tr|A0A3N7QA92|A0A3N7QA92_9BURK Isochorismate synthase OS=Burkholderia ubonensis OX=101571; GN = DF011_07900 PE=4 SV=1
MNMVSRPATLLAPRNIWEVYRPDTPLFLATPAHALLATDAADTVPHADTPLASRVADALRDACANGHAGAAVVGAVPFDVEAPAALRVARTLLRAGPLGSLRSPALTATRHATRAVPSADVYGNAVAQAAARIRAGELAKVVLARTLEITGERPVDVAPLVARLAARNPHGYTFSVDLGAGRTLLGASPELLVSRFGGIVRANPLAGSAPRSPDPVEDRRRADALLASVKDRDEHRVVVDAVRDALAPLCRRLDVPVRPSLIHTETMWHLSTEVRGETDADALTLALALHPTPAVCGAPRAAARACIRDAEPFDRGFYAGMLGWVDTQGDGEWVVTIRCAEAHDRTLRLYAGAGVVGESTPEGECAETAAKFRTMLDALGVSHDVAPEAA

SEQ ID NO: 93557 - protein, 394 aa, unidentified
  source 1..394: note = Burkholderiaceae bacterium
  REGION 1..394: note = tr|A0A5C7PA98|A0A5C7PA98_9BURK Isochorismate synthase (Fragment) OS=Burkholderiaceae bacterium; OX = 2030806 GN=E6Q92_05560 PE=4 SV=1
PLSLLATVERDTPLFLATPHHWLASEPGAALQPLQARSAELPSRALEALAAARHAGQPEAAIVGALPFDPDLPAQLHLTPRLLRARAVPVQAPTSPAWTQEVQALPSGARYAQAVGEAVARMRRGALEKVVLARTLLLRGPALPGVQDLLTRLLARHPQALTFSARTGPGRCLVGASPELLVRRTKGWLQANPLAGSLPRVADPEEDERRGRLLLASPKDLHEHALVVDAVVQALRPHCADLRVPAGPSLVKTPSMWHLSTEIQGPTEADALTLALALHPTPAVCGHPRAQALSLIRELEPFERGCYAGAVGWMDGQGDGEWAVAIRCAELGPGSLQLFAGAGIVAASDPLLEQAETGAKFRTMLDALGLGHDVTEVAPDLRAAMNGPEQGRAA

SEQ ID NO: 93558 - protein, 433 aa, Buttiauxella agrestis
  REGION 1..433: note = tr|A0A381CAF5|A0A381CAF5_9ENTR Isochorismate synthase MenF OS=Buttiauxella agrestis OX=82977 GN=menF; PE = 3 SV=1
MNSVVVALQQLQLALNAEFADAPGLEQLSVAISLSDASDALAWLTSQRLYPQFYWQQRSGDDEIAALGALRNFETLDTASAFLNDYADQPTLRITGVNAFSPTTSCLFLPRLEWRRMGGSAYLYLHLYSETSLQDDAREARHFLEQLLPAKLLPSQRLNCVGEQHIPTQPEWHQLIERATTAIEQHELDKVVLARVTDLQFTAAVSAAGFMAASRRVNLNCYHFLMVFDASHAFLGSSPERLWRRIDCALRTEALAGTVSNHPDEHRAWSLGQWLLKDDKNQRENMLVVEDICQRLQKSVGAIDVLPPQIVRLRKVQHLRRCIWTELAKPDDAQCLALLQPTAAVAGLPRDVAHQFITQYEPFEREWYAGSAGYISQRQAEFCVALRSAKVTNNMVRLYAGAGIVAGSDAAEEWQEIENKAAGLRTLLTKTTF

SEQ ID NO: 93559 - protein, 393 aa, Buttiauxella brennerae
  REGION 1..393: note = tr|A0A1B7IVN3|A0A1B7IVN3_9ENTR Isochorismate synthase OS=Buttiauxella brennerae ATCC 51605 OX=1354251; GN = M975_0510 PE=4 SV=1
MDTLLARQPQEKQLTSCADSFFFMSPYRSFSTSGCFIRLDCPAFDGENLNGGLQKQLREVFENAKKHGIEKPIAVGAIPFDPRQPSALFIPERWQTFSRAQRQSDSSQCGAAQPLNIAARKAVPEQDKFMEMVAHAAAATTQPDIDKVVLSRLIDIETDAPVDLDALLNRLISQNPTSYNFHVPLADGSSLVGASPELLLRKSGKNFSSLPLAGSARRDKDNIQRDSEIGAQLLRSTKDRHEHGLVTQAMRDVLQPHSQYLTLSDTPELITTPTLWHLATPIYGQVKDSHDNALSLACLLHPTPALSGFPHDVAQKLIAELEPFDRELFGGIVGWCDAEGNGEWVVTIRCARVGGNQVRLFAGAGIVPASSPESEWRETGVKLSTMLNVFGLN

SEQ ID NO: 93560 - protein, 393 aa, Buttiauxella gaviniae
  REGION 1..393: note = tr|A0A1B7HRM0|A0A1B7HRM0_9ENTR Isochorismate synthase OS=Buttiauxella gaviniae ATCC 51604 OX=1354253; GN = M977_03211 PE=4 SV=1
MDTLLARQPQEKQLTSCADSFFFMSPYRSFSTSGCFTRLDCPALDGENLNAGLQKQLREAFKNAKKHGIEKPVAVGAIPFDPRQPSALFIPESWQTFSRAQRQIDSSQCGAAQPLNIAARKAVPEQDKFMEMVAHAAAATALPDIDKVVLSRLIDIETDAPVDLDALLNRLISQNPTSYNFHVPLADGSSLVGASPELLLRKSGKNFSSLPLAGSARRDTNNIQRDSEIGAQLLRSSKDRHEHGLVTQAMRDVLQPHSQHLTLSDTPELITTPTLWHLATPIYGQVEDHQHNALSLACLLHPTPALSGFPHDVAQKLIAELEPFDRELFGGIVGWCDAEGNGEWVVTIRCARVGGNQVRLFAGAGIVPASSPESEWRETGVKLSTMLNVFGLN

SEQ ID NO: 93561 - protein, 433 aa, Buttiauxella izardii
  REGION 1..433: note = tr|A0A3A5JNL3|A0A3A5JNL3_9ENTR Isochorismate synthase MenF OS=Buttiauxella izardii OX=82991 GN=menF; PE = 3 SV=1
MNSVVVALQQLQLALNAEFADAPGLEQLSIAISLSDASDALAWLTSQRLYPQFYWQQRNGDDEIAALGALQKFETLEAASAFLNDYASQPTLRITGVNAFSPTTSFLFLPRLEWRRTGGGAFLYLHLYSETSLQEDAREARQFLEQLLPAKLLPSQRLNCVGEQHIPTQPEWHQLIERATTAIEQHELDKVVLARITDLQFTSAVSAAGFMAASRRVNLNCYHFLMVFDASHAFLGSSPERLWRRIDNALRTEALAGTVANHPDEHRAWSLGQWLLKDDKNQRENMLVVEDICQRLQKAVGAIDVLPPQIVRLRKVQHLRRCIWTELARPDDVECLTLLQPTAAVAGLPRDRARQFITQYEPFEREWYAGSAGYLSQRQAEFCVALRSAKVTNNMVRLYAGAGIVAGSDAAEEWQEIENKAAGLRTLLTKTTF

SEQ ID NO: 93562 - protein, 433 aa, Buttiauxella noackiae
  REGION 1..433: note = tr|A0A1B7HZY2|A0A1B7HZY2_9ENTR Isochorismate synthase MenF OS=Buttiauxella noackiae ATCC 51607; OX = 1354255 GN=menF PE=3 SV=1
MNSVVVALQQLQLALNAEFADAPGLQQLSCAVTLSDASDALAWLTSQRLYPQFYWQQRNGDDEIAALGAVRQFDTLDAARVFIDDYADQPAVRITGVNAFSPTSSFLFLPRLEWRRIGGDAFLFLNIYSETSLQNDARAALQFLEQILPAKQLPLQRLNCVGEQHIPTQPEWNHLVDLATTAIEQHKLDKVVLARATDLQFTTAVSAAGFMAASRRVNLNCYHFLMVFDGSHAFLGSSPERLWRRIDTALRTEALAGTVANHPDDHRAWSLGQWLLKDDKNQRENMLVVEDICQRLQKTVGAIDVLPPQVVRLRKVQHLRRCIWTDLAQPDDAVCLAMLQPTAAVAGLPRDVARGFIANNEPFEREWYAGSAGYISQRQSEFCVALRSAKVINNMVRLYAGAGIVAGSDAAEEWQEIENKAAGLRTLLTTSTF

SEQ ID NO: 93563 - protein, 433 aa, Buttiauxella sp.
  REGION 1..433: note = tr|A0A4R6E2J2|A0A4R6E2J2_9ENTR Isochorismate synthase MenF OS=Buttiauxella sp. JUb87 OX=2485129 GN=menF; PE = 3 SV=1
MNSVVVALQQLQLALNAEFADAPGLQQISFAVTLSDASDALAWLTTQRLYPQFYWQQRNGDDEIAALGLVHQFNTLEAAREFLDDYAGQPAIRIAGVNAFDPATSFLFLPRLEWRRTGGDAQLHLHLYSETSLKEDARAAQAFLEQLLPAKQLPLQHLNCVGEQHIPPQSEWLKLIDLATSAIEQHELDKVVLARATDLQFTTAVSAAGFMAASRRVNLNCYHFLMVFDASNAFLGSSPERLWRRIDTALRTEALAGTVANHPDDHRAWSLGQWLLKDDKNQRENMLVVEDICQRLHKTVGTIDVLPPQIVRLRKVQHLRRCIWTVLAQPDDAACLTMLQPTAAVAGLPRDVARDFIDKNEPFEREWYAGSAGYLSQRQSEFCVALRSAKVTNHIVRLYAGAGIVAGSDAAEEWQEIENKAAGLRTLLTKTMF

SEQ ID NO: 93564 - protein, 433 aa, Buttiauxella warmboldiae
  REGION 1..433: note = tr|A0A3N5EF25|A0A3N5EF25_9ENTR Isochorismate synthase MenF OS=Buttiauxella warmboldiae OX=82993 GN=menF; PE = 3 SV=1
MNSVVVALQQLQLALNAEFADAPGLQQLSCAVTLSDASDALAWLTTQRLYPQFYWQQRNGDDEIAALGALRQFDTLAAARAFIADHADQPALRITGINAFSPDSSCLFLPRLEWRRTGGDAFVYLHLFSETSLQEDARAAQQFLAQLLPAKQLPMQRLNCVGEQHIPTQPEWNQLIERATAAIEQRELEKVVLARATDLQFTCGVSAAAFMASSRRVNLNCYHFLMVFDASHAFLGSSPERLWRRIDSALRTEALAGTVANHPDDHRAWSMGQWLLKDDKNQRENMLVVEDICQRLQKNVGAIEVLPPQVVRLRKVQHLRRCIWSDLAQPDDAACLAMLQPTAAVAGLPRDAARDFIASHEPFEREWYAGSAGYLSQRQAEFCVALRSAKVTNNIVRLYAGAGIVAGSDAALEWQEIENKAAGLRTLLTKTTF

SEQ ID NO: 93565 - protein, 380 aa, unidentified
  source 1..380: note = Butyricimonas faecalis
  REGION 1..380: note = tr|A0A3S9VUU3|A0A3S9VUU3_9BACT Isochorismate synthase OS=Butyricimonas faecalis OX=2093856; GN = D8S85_12785 PE=4 SV=1
MIEQTENRLSVAEAQNICLRNNIPFYTYRLPGSREVIFGAQLSNDTRIFKGFEKHRGEKGFVITPFNHSSWSFPFFIKADLSFTDYLTDGEAIRNLQNTVFNTPERIFTKQDCEHFEYLDELRTMIDTLKREGMKKAVLSRTITIPCDSLRLSPAIFEQMKQYHHAFLFFAAIPGKCAWMGASPETFLKYDRNGFFTMSLAGTQPVATAKNPPEWGDKDIEEQQIVTDYIQDTLRHFFTRHLDIEGPITLQAGNVFHLCTFFRSDEQLPADQIDELVGQLHPTPAVCGLPKKRAMQIISEIEKRDRGYYAGFLGPLQASGAFDLFVNLRTMEVFDDALRLYVGGGITPLSDPETEWQETCQKADTLLNLIRQMNYGKITF

SEQ ID NO: 93566 - protein, 380 aa, Butyricimonas virosa
  REGION 1..380: note = tr|A0A412X461|A0A412X461_9BACT Isochorismate synthase OS=Butyricimonas virosa OX=544645 GN=DWW18_03085; PE = 4 SV=1
MIEQTENRLSVAEAQNICLRNNIPFYTYRLPGSREVIFGAQLSNDTRIFKGFEKHRGEKGFVITPFNHSSWSFPFFIKADLSFTDYLTDGEAIRNLQNTVFNTPERIFTKQDCEHFEYLDELRTMIDTLKREGMKKAVLSRTITIPCDSLRLSPAIFEQMKQYHHAFLFFAAIPGKCAWMGASPETFLKYDRNGFFTMALAGTQPVATAKNPPEWGDKDIEEQQIVTDYIQDTLRHFFTRHLEIEGPITLQAGNVFHLCTFFRSDEQLPADQIDELVGQLHPTPAVCGLPKKRAMQIITEIEKRDRGYYAGFLGPLQASGAFDLFVNLRTMEVFDDALRLYVGGGITPLSDPETEWQETCQKADTLLNLIRQMNYGKITF

SEQ ID NO: 93567 - protein, 467 aa, Caldalkalibacillus thermarum
  REGION 1..467: note = tr|F5L4C4|F5L4C4_CALTT Isochorismate synthase MenF; OS = Caldalkalibacillus thermarum (strain TA2.A1) OX=986075; GN = menF PE=3 SV=1
MIRQQLDILDDFVQGMQQALKSCRPGLVSLVTRIQPLDPLSFYAAAGQWFHGQRLYWSTPDHEFTLVGLGTAVKIESDQDTRFDDVTKEWKHLIANTHIHTEGEVMGTGPLLLGGFSFDPQKPSSSLWQNYKAASFILPQFLLTQSKNQSYLTINAYIHPEDDLPEKIDQLNRLKERLITRCMDFSFAQEVHPITLNVFEPAREEWLSSVKQVIAEIQQGVLQKVVLARRVEVESETPFRPEQILNYLRQVQTSSYVFSIEWGENAFVGATPERLIKKEGSRVLSTCLAGSIKRGQTLEEDLALSKALLQDPKNRVEHEIVVRMIKQALGDLCTRVEAPDQPIIYKTKQIQHLYTPVRGLAKDNISLLKMVEALHPTPALGGYPREEAVRRIRELEGMDRGWYAAPIGWLDRQGNGEFVVAIRSALIRHRQATLFAGCGIVEDSDPQSEYEETQMKLKPMLSALGGH

SEQ ID NO: 93568 - protein, 446 aa, unidentified
  source 1..446: note = Caldibacillus debilis
  REGION 1..446: note = tr|A0A150MD13|A0A150MD13_9BACI Isochorismate synthase OS=Caldibacillus debilis OX=301148 GN=B4135_1408; PE = 4 SV=1
MKNIDPLKFFLENRRFFPGRNFFWKEKDSDFFMAGFGAAKIIRFREKKDRFLELKRYWEDICEKLIINNPYGPVRGTGPLLFGGFSFRPLKDGALWGNFLDGFFYLPRYLLTKADGETYLTVNGGEEEAVPEWVNRFSEEAEGSGLAEMFPDESCFGAGAYPAKGTELQPERWKEHVGKAISLLKEGYGEKVVLAREMKVACEGGIDAGMVLANLFRSQTANYLFLLENGGEAFIGASPERLARKDGERIFSECVAGSAPRGKDPQEDERIGRELLSDEKNLQEHRFVVEMITGAMARYCRDLRVPEQPVILNNPDIKHLYTPVAGILREDGAFFDVLRSLHPTPALGGTPRDVALELIGRLELFERGLYGAPIGWVDHRMDGEFAVGIRSALIRGNEARLFAGCGIVKDSEAEKEFAETRVKFRPMLRALCGKTWDDGGMFDERE

SEQ ID NO: 93569 - protein, 463 aa, unidentified
  source 1..463: note = Caldilineae bacterium
  REGION 1..463: note = tr|A0A3M1FBG4|A0A3M1FBG4_9CHLR Isochorismate synthase OS=Caldilineae bacterium OX=2420332; GN = D6790_16465 PE=4 SV=1
MTSLLFDEYQPGLHGRLCSLAMPAPGLTAASFLRQGRGQERFFFRDVRTAATFAGVGVAAHLMGYGETRFASIRRQAQALFRHAVNVGEAEPLAGPRLFGGFAFRDDFTPDITWTAFHPAHFILPHYQLLERNGDVWLTINTLLPLEESPQDNRPMLQEALETRYEQLLRASGNPTENRGEASQDAPQIDYPLPFSAWAQMIHAAQEAFRRTRLQKVVLSRICQAAFHQPVDVDAALARLTARYPDCFGFLFEPQPGHAFLGASPELLVQLRGASLETMGLAGSIQRGRTQAEDAVLAQELLASPKNRREHAVVVDSIRRRLQPLTSRLDIPQEPQVLTLSNIQHLYTPIRGELARPQGVLPLVEELHPTPALGGTPRALALAFIRDHEPTLRGWYAAPVGWIDGNLDGTFTVAIRSAVVQGKRAWLYAGAGIVAGSVPALEWEETEWKFRPMKEALGIGEEA

SEQ ID NO: 93570 - protein, 433 aa, Caldithrix sp.
  REGION 1..433: note = tr|A0A523HKR0|A0A523HKR0_9BACT Isochorismate synthase OS=Caldithrix sp. OX=1962856 GN=E2O79_02225 PE=4; SV = 1
MSSKFKSAFEIEDAARSFDLFYRAAILNRLSIAAWRCPNRQNTNLIIDLSGGADRVDLNLSLLKQGFVFSPFASHEEKSGFFIKANLHLNETTYIFNDFSNGHIDADITCNKLRFESTLKELSRTGFYQEPAKNWYIRNLSNPSVSATKEQEFCNWVAAALEQIRKEKFRKVVLSRTHEVLLKDEFSVLGLFHNLCAEYPNAFVSLVAIPGNGTWVGATPELLLSLDNQELMTVALAGTQPVTSSREIQTSKWGKKEIVEQEIVSEYIRDCFKQQNINDFSEHGPETVQIGNILHLQTKFIWRNSRHNEVDVVNRLLSSLHPTPAVCGVTKKAALEFIEKTESHKREFYAGILGPVNIKNRSRLFANLRCLQLQNHSAILYAGGGITIDSIPKQEWLETELKLNALLKFIQKPNELPLSERVDSARSLEGALG

SEQ ID NO: 93571 - protein, 488 aa, unidentified
  source 1..488: note = Calditrichaeota bacterium
  REGION 1..488: note = tr|A0A3M1XED4|A0A3M1XED4_9BACT Isochorismate synthase MenF OS=Calditrichaeota bacterium OX=2212469; GN = menF PE=3 SV=1
MSKLNQRAADDPVLTSLATEKRPTSPIPFHQLHRVVGRYLEDREGYFQKLAAGLPAPRLVRLEFPVEPCEPLVWLSGQGAMPRAYWRDRQQRVEIAGAGHCLSVSSTEPADLNALFSQFRRWLATADPGLKFLGGLAFDLSRPSQDLWQPFGSYHFWVPQLECGRRDNQGYFAVNLFLDPGLSSRSPVRVALRLLSSTNGKESLLPAALPGIQQREDLPDLPGWGRAIQNVLDTIEHGNLEKLVLARQSRFVFQKEPDSLSLFHRLARANPDAYQFYFQLEGGSAFLGCSPERLFRRSGRLLFTEAVAGTRPRGHTAREDRELARQLLQSRKDRHEHFLVVKCILQGLERLCEKVESQNEPSVLKLARVQHLASRFEGLLKPGVSDADILATLHPTPAVGGYPTRAALATLRRLEPFHRGWYAGPVGWLGREEAEFAVGIRSGLFHQQEGYLYTGAGIVSGSSVQAEWNEIENKLANFLRIFEGEGDC

SEQ ID NO: 93572 - protein, 474 aa, unidentified
  source 1..474: note = Calditrichales bacterium
  REGION 1..474: note = tr|A0A524LRL9|A0A524LRL9_9BACT Isochorismate synthase MenF OS=Calditrichales bacterium OX=2528038; GN = menF PE=3 SV=1
MNISISATTITRDRIKKALLDFLDQYMSDKKDFPELLRLTVPMPEINLLAWLKNQAVDQKIYWFDKKTGLEVAAVGVADMVAGAQVENYAAVIGRVMKYAGNENFDGKYYGGFSFYKDIAPDDIWADFGAYRFILPRFEIIRKDGVYTFVCNFIQPEVESVFAVARELEVLNFQEVSFNHETSKLSDFITRPDKTQWREMIRTALRHIRQAEYEKIVLAREIELQFLSHIDPFSLMSVLRERNSQTINFCIQNGKHQVFLGSTPEMLYRRTDREILSEAVAGTRPRGRNAAEDLALAMALQTSEKEVREHGFVAESLRRNLDRLTDKLESAGEVTVLKLARIQHLYLPFSGILKAGVTDGDILEALHPTPAVGGFPEKSILPILKETEPFNRGWYAAPIGWIGAGESAFSVAIRSALVTRNKIMLYSGAGIVEGSSPDNEWDELENKLFHFKRILGVDGQSLEKHQQLLGISSY

SEQ ID NO: 93573 - protein, 471 aa, Calothrix sp.
  REGION 1..471: note = tr|K9PDY8|K9PDY8_9CYAN Isochorismate synthase; OS = Calothrix sp. PCC 7507 OX=99598 GN=Cal7507_0459 PE=4; SV = 1
MTVSPCRTSFFVEHKDLYQSLLNVQENCLKNNCRQIVSISLDIDLVDPLVVLDKLSQANEINFYFENKGKGEAIAALDAVAKLHVDGVERFTKAEHFIKNCLQNIISFGNTNLPFSGPHFFCYFSFFHQNSQIDYPFPSANIFLPRWQIAVKNQRCILVTNTIINASANIPQILQTLWSKIAIIQSLEYYSSNIDSSPIKLSKKSVTNAAQFKLSVSSILEKIQSQHLNKVVLADALDVQSSNNFNLFKSLNNLRQIHPNCYIFSTSNGKGQNFIGASPERLISIHQKQLITDALAGSAPRGKTPAEDAANANSLLNSEKERHEHLLVIDFITQRLSQLGLLPQILPPRLRQLSNIQHLWTPISATVPANIHPLKIVAQLHPTPAVAGAARDIACREIRRYENFERGLYAAPLGWVDAEGNCEFIVGIRSALIDGDRARLYAGAGIVAGSDPEKEFAEVQLKLQALLKALV

SEQ ID NO: 93574 - protein, 445 aa, Campylobacter jejuni
  REGION 1..445: note = tr|A0A4V6K5R4|A0A4V6K5R4_CAMJU Isochorismate synthase MenF OS=Campylobacter jejuni OX=197 GN=menF PE=3; SV = 1
MKQISAIIEQLDTTLAGEWPDTAGIRQFSYSLQKQPDTGLLEWLAAQPCYPKFYWQQRDGKEEAAVCGDAYAFGDTAQAQAFIRQYPEVPDLHIWGLNAFNGAEGSNFAANALFLPRIELCRQANTYWLRCTLFSPHSLRDEARRTRLFLRSLVASRALPPIASRVLQHQHLPAEPQWNQLIDRALTGIEQHQFDKVVLARKTTLTLSQPLNACAFLAASRDVNHHCYHFMLAFTPQRAFLGSSPERLFLRDHGELYTEALAGTVANHPDDHEAQKLGAWLLGDGKNQRENLLVVDDICQRLQGGAHSLDVTPAEILRLRKVQHLRRNIHGELAEPDDAGCLQRLQPTAAVAGLPRQAAREFIAEFEPFDREWYAGSAGYLSAEQSEFTVALRSAAVKGHHLELYAGAGIVAGSDAAQEWQEIENKAAGLRTLLEEHYTPAVQAG

SEQ ID NO: 93575 - protein, 466 aa, unidentified
  source 1..466: note = Unknown
  REGION 1..466: note = tr|A0A524QTE3|A0A524QTE3_9BACT Isochorismate synthase MenF OS=candidate division Zixibacteria bacterium; OX = 2053527 GN=menF PE=3 SV=1
MADKSLSKAEVQHERLIDKLRKEVKRLLESAAIGGEAGISPIKSLAMAVEDCSPLDWLRSQNANRKVYWSDRSAKFETAGIGAADWIDESTHPDEHDGLKIIQDNLVASNDGVRYYGGFRFDNSSASDNDWRPFGKYFFVVPRFEMYRSSGRSWLVCNLFFKNDRNNPEDVLREFNKLSYVRPSENNDLQTLVSRTDSPDKTRFRDMIKSAMESFSRQQFEKIVLAKKADLEFDNAIDRLLLMHKLKRETSDCFHFYLQPTSDTAFMGATPERLYHRNGKRIQCDAIAGTRPRGDSEHEDQRMGEELLSSEKDRREHRFVVDSITEALSAKCDVTIHPADDPPTLLKLERVQHLYTRIECTLNNTVTDAQFVAALHPTAAVGGYPRAGIVDEIRRLEQFDRGWYAAPVGWISKNTAEFAVAIRSALARKNHLCLYAGAGILNGSNAAAEWEEIENKMRNFLKLVRQ

SEQ ID NO: 93576 - protein, 476 aa, unidentified
  source 1..476: note = Accumulibacter sp.
  REGION 1..476: note = tr|A0A011NRG2|A0A011NRG2_9PROT Isochorismate synthase DhbC OS=Candidatus Accumulibacter sp. SK-12; OX = 1454001 GN=dhbC PE=4 SV=1
MTPRQLLDATQIAFLGRRLRALLDGARGNDLLSISLDLGGGDDDWLGVEDGAWPGVDLTRPACHWWAAPATSGGREYRLAIGRAIDFQSAGAARFSALQAAFAGLRAVWRHDDAQRSGRSPLAHLGFAFADESADGWPNAQLVVPAVLLQSAGGRRTATFSCVAAAGETALAGWLDGLRGNAWQPRRSPAPPLPETVGPLAGQAFMARVAAALQAIHGGQLDKLVLARSQRCTTDCAIDVATLLATLRDRHPGCTIYGVARGGEAFVGATPERLLALRQGTVQVDALAGSAWRAGGRGWAASPSLHDAKNRREQQFVVDAVRAALSPFCSTLAAPQAAEVLQSGALQHLRTTVHGCLQPGVAFFELLAALHPTPAVGGWPVATASRWLQSHGERRGAWYSGGIGWLDRAGDGDSVVALRCARINGRQAELFAGAGIVAGSDPAQELAETEVKLAVIADALRHARRRRPLAERAASA

SEQ ID NO: 93577 - protein, 483 aa, unidentified
  source 1..483: note = Atelocyanobacterium sp.
  REGION 1..483: note = tr|A0A086CIX0|A0A086CIX0_9CHRO Isochorismate synthase OS=Candidatus Atelocyanobacterium thalassa isolate SIO64986 OX=1527444 GN=ucyna2_00198 PE=4 SV=1
MSITPIFIPNSTSFINNPCYLENLFATYQTKFKSHDQSVIISLSYVINAVDTLSVLNFLTNKNKSPSSSDTIYFYWENKVNNEEMLGYGATQYFCIDSSDRFFRSKNFIKDCLIKIIRIKEKKEIKSPPRIFSSFTFFEKIDDPHYPFPPALAFLPYVQLIKFKNSSILTFNILIEKKTDIKQTVFNILATKKSILSLKAYQNKKRKSKDIDRLDTNLAKIQKFKNSVNLILKSIKNNEFKKLVLADFLDLKNSVNFSIPNCLDNLRFHYPDCYVFAINNGKNHCFIGASPERLLSIKNQKLITDALAGSSSRDKDKYKDYYLSQKLLKSYKERYEHQVVIKYIVKSLLNIGLSPKVLPLKILKLSNIQHLWTPIYSKLEINIHPIDIVATLHPTPAVSGFPTAITCRKIEHYEQFVRGLYAAPLGWIDSNKNSEFIVGIRSALISHNNARVYAGAGIVKGSQSEQELAEIQLKFEGLLKALS

SEQ ID NO: 93578 - protein, 504 aa, unidentified
  source 1..504: note = Cyclonatronum sp.
  REGION 1..504: note = tr|A0A345UKC9|A0A345UKC9_9BACT Isochorismate synthase OS=Candidatus Cyclonatronum proteinivorum; OX = 1457365 GN=CYPRO_1680 PE=4 SV=1
MIRTKTSDLHTKADNNRSVLPLQDDADFVACAKEAVQLTKVAKEPVIFSVTVSFESIDPLAVLEILAESDQFQYYWEHPEERLALSAGRAIRTISCKGKCPKANTNGAFTDRFSGTSEAIKAVCEDIVEYSAIRHSLAGVHFLGGFSFFDRQDAQAWKNFHAADFVVPEWSFVRDGKLCLLTVNKEVPRNVNAEKLTEGIRATIDRMATQLLKSTSAALYETSSHKSDTPEVIEEPDSLENWIESINEAKNLIRLGILSKIVLSRMLRIRLSGRQQPTRILNQLRNEYPSCYTFMMRPEGKTAFVGSTPERLLSIRSNYILTEGLAGSISRGKSATEDTILEKQLLNSEKDLEEHRLVVEDIREKLRNFCDEVNHPPQPGIKKFTNVQHLYTPISAWTNNKYDPFVILQSLHPTPAVGGVPSRKALGLIPEYELYERGWYAGPVGWLNSKGRGEFVVAIRSGLITEHEALFYAGCGIVQDSDPVAEWEETKLKLIPMLTAINHA

SEQ ID NO: 93579 - protein, 554 aa, unidentified
  source 1..554: note = Dadabacteria sp.
  REGION 1..554: note = tr|A0A3M0ZHV2|A0A3M0ZHV2_9BACT Isochorismate synthase OS=Candidatus Dadabacteria bacterium OX=2080303; GN = D6815_05630 PE=4 SV=1
MCRWRGERLRAAKLRVDPRRARRSGAGPALGRAPGYPRSGPPARGLAALGLRHLLHARRAAARRVAVATRSLPLPIRLACVPSGRGRVGRDAQERGIYRRDETVAHRRCGAVRAGDPRERCRGTRVTGYPGLGNRPAGSRLRVERQEVGDPLGALARWIHERPLFYFEHPASGRAIVGVGLAAAIATAGPERFRQAAGSATELLEALALPEERPYVRLVGGFGFAPAEASAVEWREFPPLSLMLPQQAWVWNEGQCWQVSCEAALELPGQQRSEKERHFLKHSPEPGAGESDAQWLERVERVLADIEQGRLRKLVLSRRRIERLSGTLDILGVLDRLRARRRSCYTFLVAPGETLFLGSTPELLVRKQGLAVETQSLAGTTARCGHDDEAAARLRHSAKDAREQAEVTRGIIEALGPVASRIAIEGSPRVLAVPEAYHLHTPIRAELCRPASVLEVAGLVHPTPAVCGTPRAEAARRLAREEPERGWFSGGVGWMDGCGDGEFAVALRSVLIDGHACTCWAGAGIVAGSCPQAELEETETKMSAVRSVLEECLA

SEQ ID NO: 93580 - protein, 416 aa, unidentified
  source 1..416: note = Eisenbacteria sp.
  REGION 1..416: note = tr|A0A538STV5|A0A538STV5_9BACT Isochorismate synthase OS=Candidatus Eisenbacteria bacterium OX=2212470; GN = E6K75_10045 PE=4 SV=1
MPVPQKSPWECLTRAAARAYGQALFLWEAPRGEAFGGIGAACRIEARGPGRFEEIRRRVSELLADAEHRGSVPAPFPGPVAIGGFAFGERDAEGPYSGFGDALFYVPAQMFWNAASGETMETRWTAEGPAAKSAPPERNPEDGALPGGEMARARWNEAVRSSLDRIREGGFSKVVLARAEAIPLRQDASALTIMESLRSAYPDCYRFLIDDGEGNAFLGASPERLVRLAHGEVLSEAVAGTLRCDPGDDALALAQELAGSEKNRSEHRIVLDHLLQTLGPVCEALDAPRGPEVMRLPHLLHLRTKVAGRAHAGANVLDLVSRLHPTPAVAGWPRAEALAWIARAEPEDRGWYAGPVGWVDAKGSGDFAVGIRSITMRGRTARLFAGAGIVEGSDPDLEWSEIDLKMKGIQDAIARD

SEQ ID NO: 93581 - protein, 446 aa, Enterovibrio sp.
  REGION 1..446: note = tr|A0A2A5T261|A0A2A5T261_9GAMM Isochorismate synthase MenF OS=Candidatus Enterovibrio escacola; OX = 1927127 GN=menF PE=3 SV=1
MNTLSMLSQITERLSSPFSWPTDHDPIEWLDAQSIYPKFYWHSRDGNEETIALGQVKTFSNPMSAEYTLTEGQFIWGGCSFDGRTECGQCCFQSFFFLPQIEVSRFNEQWFLSINIGNDLLKTKATLAKLSDSFSSLASPQCNIVKMVHKPDYPRWSEMIDRALTDIEYTVLRKVVLARKTTLTLDRPLSATQLLKASRDKNSANFHFMLAFDAKHCFVGSTPERLFIRQEEKLRTEALAGTIGRGITIEDDLALSHWLLNDPKNIYENKLVVDDIADQLAQYCVSFYVEELPHLVRLRKVQHLKREIFVQLNKDILSTTLLEALQPTAAIAGLPRESAMSFITKNEPFIRGWYSGSVGFLSRERSEFCVAIRSAFVMDNLIHLFAGAGIVPGSSPKIEWNELDKKISTLLCLLKPLEFKSKTTRIIDKMCLERWKKERDESIPPK

SEQ ID NO: 93582 - protein, 468 aa, unidentified
  source 1..468: note = Heimdallarchaeota sp.
  REGION 1..468: note = tr|A0A1Q9NBI5|A0A1Q9NBI5_9ARCH Salicylate biosynthesis isochorismate synthase OS=Candidatus Heimdallarchaeota archaeon LC_2 OX=1841597 GN=pchA PE=4; SV = 1
MQSLDDFCSKIKEYKLQKESIEIISYTTKFEKFVNDVCFNKTFSNIKIFPRMYWSHPEDGKIIGFGSVGEYASSEFEYNKLDNFISSIQKSILSNIENHEMIKILGGIAFNQLDAEAKSSDEWQKFPNTYFFLPKIIISTIDNEIFITLNLKLDLIRSSSVKEEFDRLLVKITSHFVKLGNNNIELSHILVNNQNSTQSFDQWKENISKIKILIENSSLEKLVLANSKILQLSKSINIGNCLDYLLKNYSEAYIFALEIEESNIFISATPELLVHKSNGKLISDAIAGSRPRGIGYDEDLKLENDLLLSKKDRKEHKFVVEQIIKKLTDAGLQKIKTNEPYVVKLKNIQHLKAEINADCDKSLPELIQILHPTAAVGGVPSEQALHNIIILENMDRGWYASPVGWITCEDSGKFVVAIRSALVKDLKVVLYAGAGIVSDSDADAEWKEIGVKFEPMMKALGVGNVNPQ

SEQ ID NO: 93583 - protein, 473 aa, unidentified
  source 1..473: note = Hydrogenedentes sp.
  REGION 1..473: note = tr|A0A3M1I4F9|A0A3M1I4F9_9BACT Isochorismate synthase OS=Candidatus Hydrogenedentes bacterium; OX = 2030809 GN=D6767_08850 PE=4 SV=1
MLQPKTDKFLEYSISELKEQAYQSLLSKPDNEIVLLRVILPPISHFKKIYPALQSKLLPQFYLKDRKGEKIYLAQGSLLEIASHSDYHAAKEAYVALENLPEGSKLFGGFSFFPKPQTNPWESFPVSYFFLPNFLWEFTKENTVLYMHFFKQHDEKENQDAIHALFDSLTQNLSLGTFTNVNPREPSCTPTFPQYKEIVEYALKNIRWNHFKKVVLAREVQCNCSLTAEEVLEALDNGEPSFLFYFRPDETSVFLGRSPELLLDIKKGATGASIVTEAVAGNRPRSKNPVENGNKEQELLHSEKDIQEHDFVVKYIEEVLDEFTTNLFTTTSNTLKVLQNVHHLYRTFRGKLKPYTSEEEILETFHPTPALGGYPKRKSLRFLEEHEIMDRGWYGAPIGFISARHSLFLVAIRSALLQGNRMHIFSGSGIVRQSDPGLEWQELNVKIKHFLDILEKADPKEVEKLKSLLSIEC

SEQ ID NO: 93584 - protein, 468 aa, unidentified
  source 1..468: note = Kentron sp.
  REGION 1..468: note = tr|A0A450X081|A0A450X081_9GAMM Isochorismate synthase MenF OS=Candidatus Kentron sp. LPFa OX=2126335; GN = menF PE=3 SV=1
MMRHSSPGFGDIGQSLPITEALRYLRESLGAVTIARRGITRIEAPLPAMDILGWLRTQRAEEKWYWDDNRDGSLILGGIGAADVIHDITAMDARAVSNRIHAMLGEDLQARLRGRYFGGMTFLPSPYVDNSWQHFGCYRFVLPRLEIVRMGKHHIMGLNLLPDDTNPQAMDDIRRMLEAIATTPKTDTPLFPMIEQRQDIPDRDGWEALLTRAIADIRNGIINKVALARKVILTLDSMIEPLDLMWSLRHREPNTLHYYLQPTPEQCFLGASPELLFRQSSEMVYTEAIAGTRRRGANSAEDAELGQDLMTHAKDAVEHQSVVDRIVQGLRALQATVFAEASRLHKMTRVQHKHTPIAAWLPPDCNAGDLLSILHPTPAVGGNPREAALAFIREHEPFERGWFAGVVGWIGYNRAEFAVGIRSALAEGNRLSVFSGAGIVAESHIPSEWQELEDKIAHILGLFTQGTL

SEQ ID NO: 93585 - protein, 477 aa, unidentified
  source 1..477: note = Latescibacteria sp.
  REGION 1..477: note = tr|A0A1V5ZT88|A0A1V5ZT88_9BACT Salicylate biosynthesis isochorismate synthase OS=Candidatus Latescibacteria bacterium ADurb.Bin168 OX=1852850 GN=pchA; PE = 4 SV=1
MIGPGISPTPCLQCAIISGEAFSFLRDQLSAPVEKHRFRAVTVPIERTWLTGGLKLGGTEPWIYWATPSGEETLAWGAAWKTAPDAQNRFAAAQSAASTLWDRIEWRGFPRTRKPHIRIFSGFAFDPAGPYGTEWNGVPSNYCVLPSICITCARGSFRATVISGRDLHGEALHGFSEFLGTLRAPLTEAREDRAFAPATPHETTGEDLHERWLRSIASIKDGITSGIFQKVVVARSVLQSLPRKPDIGRALDLLALRYPDSYRFAAYFGEKLFLAATPELLVHKRGPRFVTHALAGSMPFHGNAQAERAARRALMRSAKDSDEHSLVVEAIRRSVGGFAKTLEVSTSPRIILYGDIAHLETPLEGALEDDVHVLRLVSAIHPTPAVGGVPSDEALKWIRANEEVPRGWYAGPIGWFDSNGDGCFVTAIRSALVAPGSARLFAGAGIVAASDPATEYEETEAKLKPMRLALGLAHDVR

SEQ ID NO: 93586 - protein, 469 aa, unidentified
  source 1..469: note = Marinimicrobia sp.
  REGION 1..469: note = tr|A0A3M7KJF8|A0A3M7KJF8_9BACT Isochorismate synthase OS=Candidatus Marinimicrobia bacterium PRS2; OX = 2483458 GN=EB821_04225 PE=4 SV=1
MVELTKEKNLEQGILKSLEKAAANGESILFSFSFRFEVRDLLPILTHPSDKNTTRFYWEQPSQGFSFAGLGSILEFQSTDIENSEEINNQIKNTMEMGISVTDNSLIGPRIIGGFAFNNYRGDDDTWKNFPRKHFLLPECLGTSTDDGTWLTISRMVQPNEKLNTIINEFTRTIIFYENRLPVTLPPISRVAVDKFRDVPNRSTYDNTIFSVLENIKPGQLEKVVISRSHHVKVGKDFSVISAMQVLRNAYSNCTSFFFSLPGKGTFFGCTPERLIRLKNGYVQTEALAGTIARGNNMEEDRILGEILLDSHKEREEHNLVMEQIIRKLEPIIPNIQFPKSPQILKLKNVQHLQTPISGELENGEQVLDLVERLHPTSAVAGTPTDKAMQVIGKMEAHDRGWYSGPIGWINDKGDGEFYVALRSALVKDEEAHVFAGGGIVSESHPDTEWEETELKLQPIISALSGGQI

SEQ ID NO: 93587 - protein, 438 aa, unidentified
  source 1..438: note = Microthrix sp.
  REGION 1..438: note = tr|R4Z6L8|R4Z6L8_9ACTN Putative isochorismate synthase OS=Candidatus Microthrix parvicella RN1; OX = 1229780 GN=BN381_430048 PE=4 SV=1
MADGRTEADELHAVTTRAGTGDDPLDHLAAGAMAFRSPNRTLVAHGVARRVELGRTGGWANDVAAISEALAAIDREGRDGEPASGPVAFCALPFDRRRTAAVTIPRLVRGRDVHGSSWVTTISPANPAAGTTPSPPFPSGRSTNHLATDPTGSELGGDTAAISGPPPELRLRASIGDAEWMAKVDELTRHMAAGQLEKAVLFRELRLTSEAPLDPIALYRRLLPTAPAGYVFCLDGFVGASPELLVSRIDDTVRAEPMAGTLPRSGDPQTDLRRAGELLRSEKLRHEHAVTIERAHDALLGWCSYLDAQPEPLVVEAGAVLHLATLVEGRLSHPAPTVLDLVAALHPTPAVGGWPIAEALELIDELECLDRDRVGGAVGWVDADGNGEFAVAIRSALLDGTTARLLAGVGIVADSDPQAELEETRAKFAAVLPHLIRP

SEQ ID NO: 93588 - protein, 474 aa, unidentified
  source 1..474: note = Moanabacter sp.
  REGION 1..474: note = tr|A0A2Z4ADX7|A0A2Z4ADX7_9BACT Salicylate biosynthesis isochorismate synthase OS=Candidatus Moanabacter tarae OX=2200854 GN=pchA PE=4 SV=1
MIKISPGLYVERDFEGLLRFLTDCRDSALRDNHYKVASISLEVKHLDSLAVLESIYESDELHFYMEHPIKEEAIAGADAILEKTFHGPGRFQQVLQFSNEILNHTFAVGDLHVPFWGPHFFTAFTFYDKSGKDTSFSPATVFLPRWQVGRKEGIYGAVANIVVYPTSDPVELAERTWAAHKKFAAFDYSSVESAPKLAQKKEHKIRELGGDGAFLHSVKQACQGIALGRYEKIVIAKCIELIGPNELKPLVSLNSLRNKYPGCYAFSFSGGSEKSFIGATPERLVRVEGDFVYTEALAGSISRGATAAVDASFAQALLESAKNVDEHRFVVDFIKDCLESIGMEVEFSAKPNLLQLPNVQHLRTPIKARKPEGLHLLDTVKVLHPTPAVGGVPQEPALADIRRIEPFSRGLYAGTLGWFDHGGNGEMVVAIRSALIEGNTARAYAGNGILVNSSPEEEGIEVDLKLQALLQALH

SEQ ID NO: 93589 - protein, 486 aa, unidentified
  source 1..486: note = Omnitrophica sp.
  REGION 1..486: note = tr|A0A357BGY9|A0A357BGY9_9BACT Isochorismate synthase MenF OS=Candidatus Omnitrophica bacterium; OX = 2035772 GN=menF PE=3 SV=1
MLTPIRSWGGSPRFIRGIKGGEVSLMSLSRMDHKISAEQLRNHVAEHIHQLIGQTDPVANPQKILRIEFPCESVNVLAWLNQQKGYEKIYWLDRAGELEMAGLGVADILQGERNPDVQKIFAYFQSRLSSKFPRLRYYGGLSFDKMPMNTEWQPFGQYRFWIPRFELLQTQSDTFFAINLTCEDIRQKNIEPLLLEVSALQFPSLESRKFLPKLLARSDQPNKEDWDKLFVKVKSQLKTGGYEKVVLARKSLLRFSDPLNPMDLVERLKSQTENCFHFCFQVSPDAAFLGATPERLYKRIGRAIESEAIAGTKPRGLTLHEDEQFRNELLNSTKDAAEHRYVVDFIRNAFIEMCADLTFDPFANLLQLKGGHHLITRFSGRLKNGVEDDHILTSLHPTPAVGGYPAQEALKTIEETEPFNRGWYAGPVGYVGYDSVELVVAIRSGLIHQNSLSLYAGAGIVAASQSKEEWDEIENKIGSFINVLNS

SEQ ID NO: 93590 - protein, 328 aa, Ornithobacterium sp.
  REGION 1..328: note = tr|A0A383TZV4|A0A383TZV4_9FLAO Isochorismate synthase entC OS=Candidatus Ornithobacterium hominis; OX = 2497989 GN=entC PE=4 SV=1
MDLKNLSSPYILYRFPDEENFVFEELTIADKNDFTFQIQSFNQEKNYFFKGLKNFEINPKDFPSENLNEISQGLKNFESPIFTWEIYRNKCDFFIQEIQKGRFEKLVLSRIFKGLENPNLGELFANLSKKYPKALIYLLHLGDEIWLGATPELLLEIKNNKLQTMALAGTRSTENPHPWTQKELYEHQVVVDYISKALENLNPNVEETKTITLNNLQHLMTPISANWSDESSVEHLISRLHPTPAVCGLPQREAFEFILENEGYNRSFYTGILGFKNQTSITYFVNLRCARISHSRMDVFVGGGITAASQALAEWEETELKAKVLLDF

SEQ ID NO: 93591 - protein, 500 aa, unidentified
  source 1..500: note = Promineofilum sp.
  REGION 1..500: note = tr|A0A160SZ65|A0A160SZ65_9CHLR Isochorismate synthase OS=Candidatus Promineofilum breve OX=1806508; GN = CFX0092_A0431 PE=4 SV=2
MSHQSRQHPTALPYHSPTVASQWESTPIAERPGRLVSLFVPAAELDPLSFLRGGYGVERFYWAEPSGGASMTLAGLAVAAEVRVPPVLDDAAPFSDQSDYRFDDVIEQTTRLFEGASFHAADAGDWGVAEVEMDNHPARPRLFGGLAFQDDFVPDNTWSVFSPAHFILPHFQLVQTGHEAFLTINALIAPDEDLLDALNGMREALMARLPAADAISTRRVVSPNLSYPLSPEMWAELVDQATTAIGAGEIEKVVLSRVCELRAAEPIDAAATLDFLNEQYGDCYRFLFEPLPHHAFFGATPELLIRKTGPRVQTMALAGSIPRGQSPGEDDRLAAQLLASPKERREHNLVVETIRRDMAADMTFLNIPDAPVVLRLKNIQHLLTPIEGQLMEPQLGVVPLLRRLHPTPAMGGAPAERALAFLRRHEPVPRGWYAAPIGWLDRQQDGVFAVAIRSAVTQHARAWLYAGAGIVAESQPAQEWAETALKFRPMLGALGAGEAV

SEQ ID NO: 93592 - protein, 442 aa, Providencia sp.
  REGION 1..442: note = tr|A0A0M6W7Y2|A0A0M6W7Y2_9GAMM Menaquinone-specific isochorismate synthase OS=Candidatus Providencia siddallii; OX = 1715285 GN=menF PE=4 SV=1
MTSESFYKLINEIIKYLYKLKIQTNEYICIIRYLNKGILFSWLSWLSKQIFYPQFYWYHRNGIEESSVLGIVNSFKSIIDAEFFLLQHSECSNLRIWVLNGWNDMNEYESGFFKHSSKIFFIPRLEIFRIHSSITFSLNINGKKDISEAIVFLQNLKFSFDFSEKLFVNIVTEEYFPNYNEWCYLLTKAIREINSGNIRKVVIARETKLILSNAISVSNFLLASQKVNYYCYHFMIAFSKNSGFISSTPERLYLRKNLQLFSEALAGTVVNDIDEVIAYERLKWLIKDKKNQYENLIVVNDICQQLKKISSNIFISKTKVVRLRDVQHLCRFINATLIKPSDSKCLSCLYPTAAICGSPRVPARNFLLKNEPFHRNWYGGIIGFISLSTSEFAIAIRCAQVNGSKVSLYSGAGIVNYSDPYQEWVEIENKIVCLKSLFDITM

SEQ ID NO: 93593 - protein, 400 aa, unidentified
  source 1..400: note = Rhabdochlamydia sp.
  REGION 1..400: note = tr|A0A486XM52|A0A486XM52_9BACT Menaquinone-specific isochorismate synthase OS=Candidatus Rhabdochlamydia sp. T3358 OX=2099795 GN=menF PE=4 SV=1
MKTFFVNNTPFSYDSYFIDFSYLSPISWLASQDIYPKVYWKDKHTQTTHMALGSLLCYSDIPHIEQTEDIDLRFFGGIHFPESAWEKDLPSTLFFLPRFEVVQTDDKITLIAHFINQNSDPLIFRDLKPETPIGQITPCVKVSHLPSWAEWEKNVEHVLSIKALEKIVLARQTQFTTTPAWPLLQALEKKAETATCFAFEFSKGSTFLGATPETLFHRKKNVVFSEAIAGTRPRGTNEDELACELRSSAKDNREFNFVKNFIEKALLPLSSQLNWQEDQILRTTSVQHLYNKVIATLTSDCTDQKILAALHPTPAVCGTPTQEALKLLKSLEPFQRGWYSGAIGWLGTKGADIAVGIRSALVTNSCLKIFAGAGIVQGSNPLKEWEELEAKTAAFCRILS

SEQ ID NO: 93594 - protein, 408 aa, Streptomyces sp.
  REGION 1..408: note = tr|A0A367F9X3|A0A367F9X3_9ACTN Isochorismate synthase OS=Candidatus Streptomyces philanthi OX=371608; GN = DTL70_05555 PE=4 SV=1
MSVPLRELPASTDERRHTRPGPSLSPGAATALLDAYRSGTDRLLATPHRTLLAHGTAAETPHDARPLPERVRHLLDARRKAGDPAPLVVGALPFAPDAPAALAVPERVRCAPPLREDPLVVLPVPEREAEGRWEMREVPSAERYGQAVASAVARMRAGEFDKVVLARTLELTAPGEPDLPAMLRRLARRDPAGYTFAVPSGPGRTLVGASPELLVARRKGHLTANPLAGSAPRSDDLAEDVRRAAALLESPKDLHEHAVVVDAVREALAPYCSRLETPPRPTLVRTAAMWHLSTTVTGELSDPSVTALELASALHPTPAVCGTPTRTAREVIAALEPFARGPYTGMVGWQDADGDGEWVVTIRCAEAEGSRLRLFAGAGVVADSSPEAETAETAAKFRTFLDAVGAAL

SEQ ID NO: 93595 - protein, 473 aa, unidentified
  source 1..473: note = Viridilinea sp.
  REGION 1..473: note = tr|A0A426TTF2|A0A426TTF2_9CHLR Isochorismate synthase OS=Candidatus Viridilinea halotolerans OX=2491704; GN = EI684_18230 PE=4 SV=1
MLGVSVATAAFLQRSRMEELAERARRRARRLGRPVLVSVTTELKPRDPLALFARGLGVTHNRLFWSRPADGLAVAGLGAAWSFAATGPERFALAAHAWRELVEHAEVSADPALPFSGPMAAAGFAFDPLRPTLGHWDGFADGLLLLPRLTLATDGARTSLTVNGLVGPTTSSIQLHLAAVRRLRDLLGRAWQVPRVGAGLELFDALPPGAWRAMVADAVAELRAGTLEKVVLAREVCARSTTPFDPATTLAALCRDYPDTFVFALARGGRTFLGASPERLVSLRGHTVAASSLAGSAPRGANPAEDAALGQALLASPKDRVEHAVVTQMLLAALRHACTEVVVAPEPTLMRLRNVQHLFTPLSATAAIGTSILDLVARLHPTPALGGQPREAALAWIRQHERLDRGWYGAPIGWVDLRGQGEFAVAIRSALVGRYEASLFAGAGIVAASDPEREERETEIKLRAMLGALGDSR

SEQ ID NO: 93596 - protein, 405 aa, Candidimonas sp.
  REGION 1..405: note = tr|A0A432DMV9|A0A432DMV9_9BURK Isochorismate synthase OS=Candidimonas sp. SYP-B2681 OX=2497686; GN = EKL30_14075 PE=4 SV=1
METPAIAATQNVSVQPGSTGDQWLVDNFAVGDFFFASPDKQYRACAKDGVVSAYQAVSRDVVKALFEQASQQGVQAPVMFGLVPFDVANAASLAIPVKHTSAGIPPKASVAASDLPPQQTRPQVVSREPVPAPEQYGDMVRKALGLFDQGELKKVVLSRAMDVQLDRPVDYTRLLPDLLSRNAHGYTFAVPVWADGADAAPTGVMVGASPELLVRREGDRIYVNPLAGSIGRNSDAETDQALKDGLARSEKDLREHGYVVSDIVRILRMHCDELDVPDGPSVIGTDTLWHLSTYITGRLSDTTMTALDLSLALHPTPAICGHPTATAFGHIRDIEPFDRGYFAGLVGWQLANGDGEWALTLRCALHDGGSKLRLYAGAGTVAGSDPESEIKETATKMETFMRAIS

SEQ ID NO: 93597 - protein, 355 aa, Capnocytophaga canimorsus
  REGION 1..355: note = tr|F9YTE6|F9YTE6_CAPCC Isochorismate mutase; OS = Capnocytophaga canimorsus (strain 5) OX=860228; GN = Ccan_06880 PE=4 SV=1
MEKNTLQYNEIIGKATELLEKEIPFVIFKNPNSMQIQLIHQEDNQLFYFNDSFSVEGFVLAPFDKEKPTIFLPAEYAFEAQIESIDVPTATNENLPNDEEETFRYKKMVEQTIETIQNGVIEKVVLSREISILQEGNPLSSFERMIQKYADAFCYLFFHPEVGTWLAATPEILLKIKGNQITTMALAGTQPYVEQKDIIWKEKEKQEQQIVTDVIVDKIQERVNQLQVSEPQTVRAGSVVHLCSHIEATLKEEQDVFSVVNQLHPTPAVCGFPYEKAFEYIAQNEGYDREFYTGYCGMISNIAENILDFYVNLRCMKITAERISVYVGGGIVSQSDPESEWQETQNKARTMLSVI

SEQ ID NO: 93598 - protein, 347 aa, unidentified
  source 1..347: note = Capnocytophaga canis
  REGION 1..347: note = tr|A0A0B7IT10|A0A0B7IT10_9FLAO Isochorismate mutase; OS = Capnocytophaga canis OX=1848903 GN=CCAND93_530006 PE=4; SV = 1
MISYSEILKKAILLQESEVPFVIFRRPNEKQINLYNQIDNQVYIFEDSFANEGFVLAPFQNITHKKILLKSEEKYVANVEDFHFQFSDRKLPFDEGQKQNHIKLIKKAVQTMQNSELHKVVLSRKIAVPYHKNPVEIFQKMIENYPTAFCYLFSHPKVGVWLAATPETLLKFSENQLYTMALAGTQPFKEGIITWQQKEREEQQIVTDDILDKIKLYTENKKVSEPKTVRAGGVVHLCTHITADLQADRNPFDVVTQLHPTPAVCGFPFEAAQQFILENESYDRIFYTGYCGVVEQQKFDLYVNLRCMQLEENQAYIYVGGGVLKESIPDSEWDETQNKAQTMFRIL

SEQ ID NO: 93599 - protein, 347 aa, Capnocytophaga cynodegmi
  REGION 1..347: note = tr|A0A0B7HJ54|A0A0B7HJ54_9FLAO Isochorismate mutase; OS = Capnocytophaga cynodegmi OX=28189 GN=CCYN2B_410001 PE=4; SV = 1
MTIFNKIIELYNSGIPFVAFKKPNSNIIEVFEQSNDVVYRFDNSFSADGFVLAPFHNDDNSSIIIKADKKYQEELKSNHINAPIKKEIPFSNFEKEQHIKLIEKAIVQMQKGNFEKVVLSRKIIINYKANPVNVFEKITKHYSSAFCYLFSHPKICTWIAATPEKLLSINKNHFYTMALAGTQPYNETGKHTWKEKEKDEQQIVTNVIVHKIAPHVNNLDVSQVKTVRAANVVHLCTDIVAELKSNENPFIIVDKLHPTPAVCGFPYNEAKQFILENEHYNRSYYSGYCGIVDSKEHSIDFYVNLRCMQIENNQVFIYVGGGILKESNPQAEWEETQNKAQTMFAIL

SEQ ID NO: 93600 - protein, 351 aa, Capnocytophaga gingivalis
  REGION 1..351: note = tr|C2M350|C2M350_CAPGI Isochorismate synthase; OS = Capnocytophaga gingivalis OX=553178 GN=CAPGI0001_0695; PE = 4 SV=1
MILSPEDFLQKAKEVAAEGLPFVLFKYPNDTQIHLISQNDKNLYKVKDFTEKGFVIHPFVGIESFLLRQDNLFSTAFVGEEKKDTLPSPILSPSARVEYQTLFGKALKAIDKGELTKVVLSRRIAYTKAPKPLLTYFQDLVQAYPTAFCYAFSHPKIGKWVAATPETLVKIEDNQLRTMSLAGTKPFVEGEKPLWTEKEYREQQVVTDTIIKVLSPYTTDLSTGKIHEVRAGRLWHLCTEIMAKIAPHTKIKQIVNNLHPTPAVCGFPTEKARQFLLENEGYPREFYAGYCGLVDFKHKNSLDLFVNLRCTQLTDKEVFVYVGGGVNSGSQEESEWQETENKAQTMLRILQ

SEQ ID NO: 93601 - protein, 351 aa, Capnocytophaga granulosa
  REGION 1..351: note = tr|A0A381DS88|A0A381DS88_9FLAO Isochorismate synthase dhbC OS=Capnocytophaga granulosa OX=45242 GN=dhbC; PE = 4 SV=1
MNQSKEEFLEKAKEVALRGLPFALFSYPNSADIHLIYQNDDTLYTTNLCEGDGFIMCPFYGGTPLLLKQEHHLTTPLFSVEKPILSADLIPTQGDREHYHTLFQKALKAIEGHTLEKVVLSRRIAYQGNQKSLLTYFQDLKALYPTAFCYAFSHPKVGRWLAATPETLIKVVGDTLCTMSLAGTKPFVEGKSPLWTEKEYREQKIVTDTITQVLHPLTTDLSIGKVHEVRAGRLWHLCTEITAKITSNTPIQEIVQRLHPTPAVCGFPTDKARNFLLENEGYPREFYAGYCGLTHWGAHRSIDLFVNLRCAQLTQKEIFVYVGGGVNSGSQEESEWQETENKAQTMLRVLQ

SEQ ID NO: 93602 - protein, 314 aa, Capnocytophaga ochracea
  REGION 1..314: note = tr|A0A2X2SYZ6|A0A2X2SYZ6_CAPOC Isochorismate synthase entC OS=Capnocytophaga ochracea OX=1018 GN=entC; PE = 4 SV=1
MEQEDDTLHFFNTDKEEQEGFVFAPFDANEPAVIITPNKVTVSHLPTQSIVENTNIDILEDTKTEKQKHIDLVTKAIDEIHRGHFEKVVLSRKITIKEVVNPFKSFANMVTRYPSAFCYLFYHPKVGTWLAATPETLFRSNGEDFCTMALAGTQPFKEGEIHWHTKEKEEQQIVTDTIVQQLQEYVNELEVSAVKTVQAGSLMHLCTEIKGKIAPDKVYELIKRLHPTPAVCGYPTEEARTFIIENELYKRQYYTGYCGWVSNNNQAFYVNLRCMQIEREQSYLYVGGGITKDSIPEKEYEETQNKAMTMMTII

SEQ ID NO: 93603 - protein, 355 aa, Capnocytophaga sp.
  REGION 1..355: note = tr|I8UPF3|I8UPF3_9FLAO Isochorismate synthase; OS = Capnocytophaga sp. oral taxon 412 str. F0487 OX=1125721; GN = HMPREF1321_0355 PE=4 SV=1
MRIETEDYISFEELLKQVQHKYAEHLPFVCYKPPHHTSVILLGQEDDTLHFFNTDKEEQEGFVFAPFDANEPAVIITANKVTVSHLPTQSIVENTNIDILEDTEAEKQKHIGLVTKAIDEIHRGHFEKVVLSRKITIKEVVNPFKSFANMVTLYPSAFCYLFYHPKVGTWLAATPETLFRSNGEDFCTMALAGTQPFKEGEIHWHTKEKEEQQIVTDTIVQQLQEYVNELEVSAAQTVQAGSLMHLCTKIKGKIAPDKVYELIKRLHPTPAVCGYPTEEARTFIIENELYKRQYYTGYCGWVSNNNQAFYVNLRCMQITDNEAYLYVGGGITKDSIPEKEYEETQNKAMTMMTII

SEQ ID NO: 93604 - protein, 355 aa, Capnocytophaga sputigena
  REGION 1..355: note = tr|A0A2A3N2N5|A0A2A3N2N5_CAPSP Isochorismate synthase OS=Capnocytophaga sputigena OX=1019 GN=menF PE=4; SV = 1
MRIETEDYISFEELLKQVQHKYAEHLPFVCYKPPHHTSVILLEQEDDTLHFFNVGKEEQEGFVFAPFDTNEPAVIITPNKFTISHLPTQSIVENTNIDILEDTKTEKQKHIDLVTKAINEIHQGTFEKVVLSRKITIKEMVNPFKSFTNMVTRYPSAFCYLFYHPKVGTWLAATPETLFQSNGSNFQTMALAGTQPFKEGEIHWLSKEKEEQQIVTDTIVQQLQGYAEKFEVSAPKTVQAGKVMHLCTIIKGKIKENKAFEIIQRLHPTPAVCGYPTDKAHKFIIENELYNRQYYTGYCGWVSNNNQALYVNLRCMQITANETSLYVGGGITKDSIPEKEYEETQNKAQTMITIL

SEQ ID NO: 93605 - protein, 463 aa, Carnobacterium divergens
  REGION 1..463: note = tr|A0A2R8A3S9|A0A2R8A3S9_CARDV Isochorismate synthase OS=Carnobacterium divergens OX=2748 GN=menF PE=4; SV = 1
MVELPVGLVAQVEELLTKQEKVLVSWVTKIESLNPLMIFKQGKGVYSTKRFFWQNPSKKVTLVGLGSTNQFCSNKGITSYQDVHEFNQQLKKQTATNQKRRATGALLFGGFDFDPERGESKEWQDFQSAFFYLPTYLVTVLSEETFLTINFYVDSQTDLHQKANEFFGKWEELLEEQIVPKAAKAVVTNKTELATTEWIQAVDETVKLIKQSTTLQKVVLSRQLLVEHDSVVDVEDVLERLMMTQQNSYFFVLENKEKAFIGATPEQLLAAENQHYYSACVAGSAPRGKTKAEDQVIGEALLKDHKNTHEHHLVVEMISETLRTLTMDLNVSGNPTLLKNRDIQHLFVTVEGKRQATVPFLMAVKAMHPTPALGGLPRNEALAVIREKEPYHRGFYGAPIGWLNQDDEGEFAVAIRSALLMEKQSILFAGCGLVAGSKSAEELIETRIKFQPMLRALGGLDHE

SEQ ID NO: 93606 - protein, 462 aa, Carnobacterium maltaromaticum
  REGION 1..462: note = tr|K8EKX7|K8EKX7_CARML Isochorismate synthases family protein OS=Carnobacterium maltaromaticum LMA28; OX = 1234679 GN=menF PE=4 SV=2
MWTLPSDISEAAKLKLEEHSSVLVSYVRELNELDALTLFKKGAKKYTGQRIFWQNPSKTVTLAGIGCTERYSSKAGNESYTELNQFKDKLKKQTVSNEIILGTGALLIGGFSFDSLAKADANWEEFQDAYFSLPTYLLTTTAEKSYITFNFYVTQADLIEKPLRIMKQWEELLATPFVTETEIAAITKKEELATDSWLAAVSETVDAIKASKELNKVVLSRQMLLTHETDVAIEAVLEKLKKTQQNSYFFVVENGEKTFLGATPERLLSAEGNKFYSACVAGSAKRGATFAEDQAIGDRLLADHKNVHEHQLVVEMIRHTMEGFTTDLAISGGPTLLKNRDIQHLFLTLAGTKKEHFSFLEAVKGMHPTPALGGVPTDLALEVIRQKEPYNRGFYGAPIGWVDSSDQGEFAVGIRSALIMGQQSLLFAGCGIVAGSDPTEELNETAIKFQPMLRALGGMENE

SEQ ID NO: 93607 - protein, 580 aa, Catharanthus roseus
  REGION 1..580: note = sp|Q9ZPC0|ICS_CATRO Isochorismate synthase, chloroplastic OS=Catharanthus roseus OX=4058 PE=1 SV=1
MASITGHCVAHFTDLSTRKSSFFSNSNNNSSLFRRKSTNIVTRKKYIFCSTSLSMNGCNGDPRAPVGTIETRTLPAVSTPALAMERLSSAVANLKSTLPSAQSGIIRLEVPIEEHIEALDWLHSQDQKNLLPRCYFSGRSQVTFSDFTSNDLTNRNGSAANGHLQRISTSSDDKNLVSVAGVGSAVLFRSPNPFSFDDWLSIKRFLSKNCPLIRAYGAIRFDARPHIAPEWKAFGSFYFVVPQVEFDELHGSSMIAATVAWDNALSLTYQQAIVALQTTMEQVSSTVSKLRQDVSHTSLVSKANIPDRTSWDLTLNRVLEEIGNKYSPLTKVVLARRSQVITTSDIDPLAWLSSFKADGKDAYQFCLQPHEAPAFIGNTPEQLFGRDQLTVFSEALAATRARGESDSLDLQMAHDLFSSPKDNHEFAIVRENIRQKLDAICTSVETEPMKSVRKLKRIQHLYARFAGRLRSEDDEFKILSSLHPTPAVCGFPMEDARKFIAENEMFDRGLYAGPVGFFGGAQSDFSVGIRSALIGKDAGALIYAGLGVVEGSDPALEWQELELKASQFMKLMKLEAPALK

SEQ ID NO: 93608 - protein, 425 aa, unidentified
  source 1..425: note = Caviibacterium pharyngocola
  REGION 1..425: note = tr|A0A2M8RY96|A0A2M8RY96_9PAST Isochorismate synthase MenF OS=Caviibacterium pharyngocola OX=28159; GN = menF PE=3 SV=1
MDSLQSIKKRLIEHINRYQAQDEEISCVRIQSKLSVNLLSWLKAQSNYPQFYLNFRDDAQIVATIGEVRCFDDTKAAQRFMQETQLPLFGGLTFYAHAGFFLPRLVLQQQNDELSVSLFIDNGKKNPTEERKAIAALLETFEKITALQPVRQQIRLTEQKAAQDQWCQWVEKALQRIRSGELTKVVLANETVFRTQNPLNPKDFLVESERCNFGCYHFLLQENPRSAFLGSTPERLYRRQGLLLQTEALAGTALMCEDEEQNRRQGEWLLQDPKNLYENWLVVEDISQNLQPYVRDIVVADSELKQLRQVQHLKRKIHAELLPDYGDVLCLDAIHPTAAVAGLPRDRAVRFLAETESFNRGRYAGAVGVMAPDCAEFCVAIRSAFIAADKIHVFAGAGIVEGSIPLLEWQEIERKALGLVSLLQE

SEQ ID NO: 93609 - protein, 400 aa, unidentified
  source 1..400: note = Cecembia lonarensis
  REGION 1..400: note = tr|K1L1B9|K1L1B9_9BACT Isochorismate synthase entC; OS = Cecembia lonarensis LW9 OX=1225176 GN=entC PE=4 SV=1
MQKAVDIAVWDLEYYLGCLIATEMQEGRQIALWRKPKSNILEILIDKSEQPKRVELNIEELPSGFIVHPFEDQVDGKAFFLEADNYFKIDLSVPLEEQADRVDPLRKTLDPDQIKGIIQKNLGHTEVETELKSNRACSKKDFTDLVEKGVEAIKEGQLIKIVPARLKKKALGKGFDLIKSLKSILYAYPNAFINFFHIPGVGTWLGASPEILIQTKGDAFYTMSLAGTQKAKGDNPMKNAAWTQKEIEEQALVSRYIVDCFKKIRLREYEEIGPKTVLAGNLLHLRSDFRVDMKATNFPQLGSVMLKLLQPTSAVCGMPRNKAFEFLRTYEKLNRSLFAGFIGPVNVEGETSIYVNLRTARLTEKEAYLYAGAGVTEDSVPEKEWEETEMKCEIIGKHLK

SEQ ID NO: 93610 - protein, 423 aa, Cedecea davisae
  REGION 1..423: note = tr|S3ITT5|S3ITT5_9ENTR Isochorismate synthase MenF; OS = Cedecea davisae DSM 4568 OX=566551 GN=menF PE=3 SV=1
MQQELAGEFADEPGLQRLCVAVTLSDASDPLAWLTAQPLFPQFYWQQRNGNEEVAALGALLQFSALGQAQSFLQSHPGQPFLRVWGLNAFDPAQGFLFLSRLEWRRVGGEAHLWLHLYSETSLKQDAQAAAAFIEQLLPAKPLPQLNLKCLGATHLPEQPEWHRLIDLATGAISQGKLDKVVLARATDLAFSSPVSAAGFMAASRRVNLNCYHFLMAFDPQNAFLGSSPERLWRRIDDALRTEALAGTVANHPDDMQAEKLGQWLLKDDKNQRENMLVVEDICQRLQGTVGALDVLPPQVMRLRKVQHLRRCIWTLLKRQDDALCLKQLQPTAAVAGLPRELARAFIAAHEPFEREWYAGSAGYLSRHQTEFCVALRSARVSGSAVRLYAGAGIVAGSVASEEWQEIENKAAGLKTLLIDGGN

SEQ ID NO: 93611 - protein, 433 aa, Cedecea lapagei
  REGION 1..433: note = tr|A0A3S4ILM0|A0A3S4ILM0_9ENTR Isochorismate synthase MenF OS=Cedecea lapagei OX=158823 GN=menF PE=3; SV = 1
MNSVAVALQQMQQELAGEFADAPGLQRLCVPVTLSDASDPLAWLTAQSLYPQFYWQQRSGNEEVAALGALLSFTALEEAQVFLQSHPEQPLLRVWGLNAFDPAHGFLFLSRLEWRRVGGEAFLWLHLYSETSLKQDALAAAAFIKQLLPAKLLPQLNLKCRSETHLPEQPEWHRLVDQVVTAIGQNELDKVVLARATDLTFTSPVSAAGFMAASRRVNLNCYHFLMAFDAQNAFLGSSPERLWRRVDDALRTEALAGTVANHADDAQAAKLGQWLLKDDKNQRENMLVVEDICLRLRDDVGALDVLPPQVVRLRKVQHLRRCIWTQLKRQDDALCLKQLQPTAAVAGLPRELARAFISANEPFEREWYAGSAGYLSRHQTEFCVALRSAQVSRSEVRLYAGAGIVAGSVAADEWQEIENKAAGLKTLLVGGGN

SEQ ID NO: 93612 - protein, 433 aa, Cedecea neteri
  REGION 1..433: note = tr|A0A089RJV1|A0A089RJV1_9ENTR Isochorismate synthase MenF OS=Cedecea neteri OX=158822 GN=menF PE=3 SV=1
MNSVAVALQQMQQELAGEFADAPGLQRLCVPVTLSDASDPLAWLTAQSLYPQFYWQQRSGNEEVAALGALLSFSALEEAQTFLQSHPEQPFLRVWGLNAFDPAHGFLFLSRVEWRRVGGEAYLWLHLYSETSLKQDALAAAAFIEQLLPAKLLPQLNLKCLGETHLPEQPEWHRLVDQVVSAISQDELDKVVLARATDLAFSSPVSAAGFMAASRRVNLNCYHFLMAFDAKNAFLGSSPERLWRRIDDALRTEALAGTVANHADDAQAAKLGHWLLKDDKNQRENMLVVEDICQRLRDAVGALDVLPPQVMRLRKVQHLRRCVWTQLKRQDDALCLHQLQPTAAVAGLPRELARAFIAANEPFEREWYAGSAGYLSRHQTEFCVALRSAKVSHTGVRLYAGAGIVAGSVAAEEWQEIENKAAGLKTLLVGGGN

SEQ ID NO: 93613 - protein, 433 aa, Cedecea sp.
  REGION 1..433: note = tr|A0A1X7I1L6|A0A1X7I1L6_9ENTR Isochorismate synthase MenF OS=Cedecea sp. NFIX57 OX=1566286 GN=menF; PE = 3 SV=1
MNSVAVALQQMQQELAGEFADKPGLQRLCVPVTLSDASDPLAWLTAQSRYPQFYWQQRNGNEEVAALGALLRFSALEDAQTFLQSHPEQPFLRVWGLNAFDPSHGFLFLSRLEWRRVGGEAFLWLHLYSETSLKQDAIAAAAFIEQLLPAKLLPQLNLKCLGETHLPEQPEWHRLVDQVVSAISQKALDKVVLARATDLAFSSPVSAAGFMAASRRINLNCYHFLMAFDARNAFLGSSPERLWRRIDDALRTEALAGTVANHPDDAQAAKLGQWLLKDDKNQRENMLVVEDICQRLQAAVGALDVLPPQVMRLRKVQHLRRCIWTQLKRQDDALCLKQLQPTAAVAGLPRELAREFIAENEPFEREWYAGSAGYLSRHQTEFCVALRSAKVRHTGVRLYAGAGIVAGSVAAEEWQEIENKAAGLKTLLIGSDN

SEQ ID NO: 93614 - protein, 348 aa, unidentified
  source 1..348: note = Cellulomonas rhizosphaerae
  REGION 1..348: note = tr|A0A413RP13|A0A413RP13_9CELL Isochorismate synthase (Fragment) OS=Cellulomonas rhizosphaerae; OX = 2293719 GN=D1825_05030 PE=4 SV=1
EVKLPGTGPVAFGSFAFDEHSPVGGVVVVPRVVVGRRGGRTWLTTVTTGAQLGSAPALADVVGPRVPPHDPGEVVYADEHAADWQDVVAHGIAAVRAGEVDKVVLARDVEARTQRPLDARWVLDRLAAQYPSCWTFSVDGMLGATPELLVRSEKGLVTSRVLAGTIRRTGDDAADVARAAILAHSSKDLEEHEYAVTSVAHALEPFCSSTNVPDVPFVLHLPNVLHLASDVTGVLAGTDGDHPTSLALAAALHPTAAVCGTPTQAARELIARVEGMDRGRYAGPVGWFGADGDGEWGIALRSAQVDPDDARRVRLFAGCGIVAASDPAAELAESEAKLVPMRYALSRD

SEQ ID NO: 93615 - protein, 441 aa, Cellulomonas sp.
  REGION 1..441: note = tr|A0A4Q5MWE2|A0A4Q5MWE2_9CELL Isochorismate synthase OS=Cellulomonas sp. HLT2-17 OX=1259133; GN = EUA98_16625 PE=4 SV=1
MSTLQTQDADAVPQPLVVRTVAIDDPGTLLDLLPVDAPLAWVRRGDGLVGWGEVLRFEVTGPDRFRAAESRWHDALAHAVVRDEVDLPGTGPVAFASFAFDEGSPAGGVVIVPRVVVGRRGATTWMTTIDLGARIGTVPSLDAAVRDRTPVAAPGAVTFTDGAVPADRWPDVIARGVAAIRAGEVDKVVLARDVIAHTTHPLDPRWVLDRLGDDYPSCWTFSVDGLLGATPELLVRSEKGLVTSRVLAGTIRRTGDDHADLARAAILAHSSKDLEEHEYAVSSVADALAPFCSSTNVPDVPFVLHLPNVLHLASDVTGVLSSAHPGSDAALTGLAPSSLALAAALHPTAAVCGTPTPVARALIARLEGMERGRYAGPVGWFGADGDGEWGIALRCAEVDPDNARRIRLFAGCGIVAASDPASELAESEAKLEPMRHALASD

SEQ ID NO: 93616 - protein, 455 aa, Cellulosimicrobium cellulans
  REGION 1..455: note = tr|A0A516N7Q0|A0A516N7Q0_CELCE Isochorismate synthase OS=Cellulosimicrobium cellulans OX=1710; GN = FOG94_06950 PE=4 SV=1
MSAEPSATAAQPHPLVVRTTRIPDLPGGLDALVDLLPDTRPLAWVRRGDGIVGWGEALRLETWGPGRFADAEAAWHETLARAVVRDEVGLPGTGPVAFGSFAFDDSAPGDDAHDPVRAGGVLVVPRVVVGRRDGHAWLTTVDTAGSLSSSPTDALRRTPREPVRAPGAVAWHDGALGADDWAAVVAEGVERIRSGALEKVVLARDVVAHTSEPVDPRWLLARLASAYEACWTFSVDGLVGATPELLVRSEKGLVTSRVLAGTIRRGGLSDDEALLRAAQLARSSKDLEEHEYAVRSVAQALAPFCSSMNVPDSPFVLHLPNVMHLASDVTAVLARGASAPGASGGAAAGPTSLALAAALHPSAAVCGTPTVVARDLIREIEGMDRGRYAGPVGWLGADGDGEWGIALRSAELSGTDPRSVRLFAGCGIVAASDPAAEVAESEAKLEPMRYALGDA

SEQ ID NO: 93617 - protein, 454 aa, Cellulosimicrobium funkei
  REGION 1..454: note = tr|A0A4Y8QZF7|A0A4Y8QZF7_9MICO Isochorismate synthase OS=Cellulosimicrobium funkei OX=264251; GN = E1O70_13735 PE=4 SV=1
MSAEPSATAAQPHPLVVRTTRIPDLPGGLDALVDLLPDTRPLAWVRRGDGIVGWGEALRLETWGPGRFADAEAAWHETLARAVVRDEVGLPGTGPVAFGSFAFDDSAPGDDAHDPVRAGGVLVVPRVVVGRRDGHAWLTTVDTAGSLSSSPTDALRRTPREPVRAPGEVAWHDGALGADDWAAVVAEGVERIRSGALEKVVLARDVVAHTSEPVDPRWLLARLASAYEACWTFSVDGLVGATPELLVRSEKGLVTSRVLAGTIRRGGLSDDEALLRAAQLARSSKDLEEHEYAVRSVAQALAPFCSSMNVPDSPFVLHLPNVMHLASDVTAVLARGASAPGTSGGAAAGPTSLALAAALHPSAAVCGTPTVVARDLIREIEGMDRGRYAGPVGWLGADGDGEWGIALRSAELSGTDPRSVRLFAGCGIVAASDPAAEVAESEAKLEPMRYALGA

SEQ ID NO: 93618 - protein, 454 aa, Cellulosimicrobium terreum; identical to SEQ ID NO: 93617
  REGION 1..454: note = tr|A0A4R9EAI0|A0A4R9EAI0_9MICO Isochorismate synthase OS=Cellulosimicrobium terreum OX=412439; GN = EQW79_013750 PE=4 SV=1

SEQ ID NO: 93619 - protein, 459 aa, Cerasibacillus quisquiliarum
  REGION 1..459: note = tr|A0A511V2W2|A0A511V2W2_9BACI Isochorismate synthase MenF OS=Cerasibacillus quisquiliarum OX=227865; GN = menF PE=3 SV=1
MIDQNAVSLDKLLNSIMDQGLSHNRQLVSYTKQIQPFNPLSVLELGKEEDRFFWKRNDNCLYLVGIGNLIELVFDRVNYQKIHEEWNALVDKAIVHNPYPVPGTGLLSFGGIAFDDRREPSTLWKNFSASQFRVPKFLFIKYNDAYYLTINFIVHAHINSDLLVQNIQQKEQQLLQDLSGLPPLGTILKEEEMDIAKWLQSIENAKQTIQNHLAEKIVLARELRLKLSSTGEMSTVVKRLIETQPKSYVFAFEQGDECFLGATPERLIRLEDDQLESMCLAGTAPRGETDMADEQVRHELLNDKKNREEHDFVVQMIRRAIERYCVDIRIPDTPTVFPLKNLQHLYTPVTAQLKRDYHIFDLVEQLHPTPALGGTPKEIALAFIRKHEPLDRGWYGAPIGWVDHRNNGEFAVAIRSGLIQSNAASLFAGCGIVKDSEVEAEYEETKIKFLPMLHVLGGK

SEQ ID NO: 93620 - protein, 462 aa, Cerasibacillus sp.
  REGION 1..462: note = tr|A0A5C8NGS4|A0A5C8NGS4_9BACI Isochorismate synthase MenF OS=Cerasibacillus sp. CC-CFT480 OX=2498845; GN = menF PE=3 SV=1
MTDTRNLNLKEILTKAKEEGKKVNRQLVSYTRKINDFNPLAIFENGKELSQKKRMFWKRYDDQYIFVGIGNITEIVVENEGKQAIYNKWRRIVKEAIIYNPYQEAGVGLVAFGGIAFDPKKAPTPLWAKFAENEFRIPQFLFIKKKDSFYVTINMLINKDENIEECLKEYENIEKQLLGERTIHPTMGKIIDKQEINPEQWKQAIEDAKVNIQQKQTEKIVLARELRLHLSQSVDITSVLHTLIATQPNSYVFAYEQGTDCFVGATPEQLINVEGNQLQSMCVAGTAPRGRTDEEDERLNNELFHDKKNREEHDYVVQMIRQSIEPFCYKIDIPNTPTVYPLKNLQHLYTPVTAILKSGQHLFDLIDTLHPTPALGGTPKDTALAFIREHEHLDRGWYGAPIGWIDCHDNGEFAVAIRSALIQEKEASLFAGCGIVKDSDTQTEYEETKIKFLPMLSVLGGS

SEQ ID NO: 93621 - protein, 418 aa, Cesiribacter andamanensis
  REGION 1..418: note = tr|M7NWU9|M7NWU9_9BACT Isochorismate synthase entC; OS = Cesiribacter andamanensis AMV16 OX=1279009 GN=entC PE=4; SV = 1
MSDTYDYKTGEALQQPIPSGQLFAAALQLAAARGYSFAAWRLPAQQQPSLLIDLSGSAAKVHPSLEELPTGFLFAPYQADLTALDAREKPGCLFLRADLLWEGQQGELRPAEGLPPQRRAQAESFLEELEQEEAPAASAYPLAPCRAGTTPKTQYIHLVEQSVAAIRRGDFQKNVCARTKEVALPAGFSLSSFFLHLSAAYPNAFVSLVAIPGVGTWIGATPEILISVDRHQKFCTVALAGTQRRQAGMRPVDAVWRQKEIEEQAMVSRYIINCLKKVRIREFEEIGPRTIAAANLLHLRTDFTIDLKEVHYPNLPTVMLELLHPTSAVCGLPKEPAAAFLETHEQLDRSFFAGFLGPVHLQQETHLFVNLRCMQLLERTALLYAGAGITADSDAEREWQETEHKCQTLLDVLYEASR

SEQ ID NO: 93622 - protein, 472 aa, Chamaesiphon minutus
  REGION 1..472: note = tr|K9UMG9|K9UMG9_CHAP6 Isochorismate synthase MenF; OS = Chamaesiphon minutus (strain ATCC 27169 / PCC 6605); OX = 1173020 GN=menF PE=3 SV=1
MDHYLTIATQVQNFFKYDLIDLPPEMAGKILRIEVQISTLEPLSWLARQKSDVKTYWCDRQGDFTMAGVGTVATIAGDCPIDYPDIFGQLRQSLSSLFPQARYYGGIGFSQSRSISPIWELFGNYRFVVPRFEVLVRGLETFFACNLTLNAFPNLGNELWETELTMILDELARLDFTQPELPPELPLQIARLDRPNRVQWQRNIELALAKFNELNLDKIVLARRSTLTFTHNLQPQLLLRSLKPHNPHSYHFCFQIAPTTAFIGTSPERLYSRADRLLKTEAIAGTRQRGTSATIDRELGDNLRTSLKDIHEHELVVTNLRGVLTELCHSVTIDDESAILKLNKVQHLYTQCQGLLRSHLTDADILPKLHPTPAVGGFPRAPALKLIQELEPFDRGWYAAPVGWVGYDDVEFAVAIRSGAIDRDRLFLFAGAGIVRGSQSAEEWVEIENKIRHFTDLFSDLPPQQIIDLSLA

SEQ ID NO: 93623 - protein, 472 aa, unidentified
  source 1..472: note = Chamaesiphon polymorphus
  REGION 1..472: note = tr|A0A2T1GDI8|A0A2T1GDI8_9CYAN Isochorismate synthase MenF OS=Chamaesiphon polymorphus CCALA 037; OX = 2107692 GN=menF PE=3 SV=1
MDHYLTIAAQVQNFFKYDLIALPPEMVGKVLRIEVQISTLEPLSWLARQKSDVKTYWCDRQGNFTMAGVGTVATIDGDRPIDYPDIFGQLRQSLSLLFPHVRYYGGIGFSQSKSISPIWESFGNYRFVVPRFEILVRGLETFFACNFTLNSLPNLGHEIWETELATILDELARIDFSQQELPTELPLQIARLDRPNRVEWQRNIELALAKFNALNLDKIVLARRSTLTFTHNLQPQLLLRSLKPHNPHSYHFCFQIDPTTAFIGTSPERLYSRADRLLKTEAIAGTRQRGTSASIDRELGDNLRTSLKDIHEHELVVTNLRGVLTELCHSVTIDDESAILKLNKVQHLYTQCQGLLKSHLTDADILPKLHPTPAVGGFPRTPALKLIQELEPFERGWYAAPVGWVGYDDVEFAVAIRSGAIDRDRLFLFAGAGIVRGSQSAEEWAEIENKIRHYTDLFTDLPPQQIIDLSLA

SEQ ID NO: 93624 - protein, 430 aa, unidentified
  source 1..430: note = Chania multitudinisentens
  REGION 1..430: note = tr|W0L8Y5|W0L8Y5_9GAMM Isochorismate synthase MenF; OS = Chania multitudinisentens RB-25 OX=1441930 GN=menF PE=3; SV = 1
MEQFSGLLRQLRQQLEQVFPTEAGWRQIILPVPERLATMLLEWLAAQAVFPQFYWRQREGQQEAAVCGALRQFTHPAQAQAFLYAYPAARLWGLNAFDNRALLFLPRMEILNYSGKGELTLNLFSEHSLDEDVVAASRWLDELVAAKPLAEMQTTVASVLHQPERSEWENQLRDVLQAIEKRQLEKVVLARRTLLTLSSPLFAPALMAASRKVNHRCYHFMMRFNAHSAFLGSSPERLYRREGRHLLTEALAGTVANHTDGQQARALAQWLLHDVKNQQENLLVVDDICQRLQGGANAVDVLPPEVVRLRKVQHLRRRIEGQLNHGDDADCLQRLQPTAAVAGLPRQAARDFIQQHEPFSRGWYAGSAGYLAVAQSEFCVALRSTQIDGAQVQLYAGAGIVAGSDPAEEWQEIENKAAGLRTLLQPENKL

SEQ ID NO: 93625 - protein, 468 aa, Chlorobaculum limnaeum
  REGION 1..468: note = tr|A0A1D8D1Y7|A0A1D8D1Y7_CHLLM Isochorismate synthase MenF OS=Chlorobaculum limnaeum OX=274537 GN=menF; PE = 3 SV=1
MPADDSILMMQKALQLLEESVKAAIRHKDGPSARSGQPVLERFSAPLGEVDATRWLSAQSLFPKLFWMNREKSEWIAGIGESDRIEISETGPNDRSFLVLDEAMQRKNPQARYIGGFCFNNLQKQNRLWSAFSPGLFILPLVSVEYRDGQASISCSLWLKPGDDRQKALEQLLLTLSELSAGDTPEAAPIPEMTRVDYCPDKAQWIENCETILRNFDEGKLDKVILARQTELSFAGKVPAIRFLLDYPFPENTAYRFYFEPVEGHAFVSFTPERLYRRDGDMLETEALAGTVTKEALKADDIAASELLLNSEKDIREHRFVKDTIYQELQPVCSHIDMQEEVGVLQLNRLAHLLARCKARLLPEFSNDSTVLRQLHPTPAVGGVPREKAMSLILSIEPFCRGWYAAPVGWLSHDAAEFAVGIRSALVNDDKVYLYSGAGLVRGSNPESEWEEVDQKIGDILAITQQTS

SEQ ID NO: 93626 - protein, 469 aa, Chlorobaculum parvum
  REGION 1..469: note = tr|B3QL01|B3QL01_CHLP8 Isochorismate synthase MenF; OS = Chlorobaculum parvum (strain NCIB 8327) OX=517417; GN = menF PE=3 SV=1
MPADDSTLMLQKALQLLEESVKAAIAQPQPPHNDNGRPVLESFTTSIDGSVDGPAWLAERQQFPKLFWMNREKSEWIAGIGEADRIEITETGPNERSFTLLEEALKLKNPHARYVGGFCFNNRQQQDHIWHGFSSALFILPLISLEHRDGKTSMTCSVWLKPEDDRKQALEQLLQTLASLRSEQAVKTPAIPGRTRTAYSPDRAQWIERCETILRKFDEGGLDKVILARQTELSFSGKVPAIRFLLDYPYPENAAYRFYFEPIEGHAFVSFTPERLYRRDGDLLQTEALAGTVTKEKVKADDHTASKLLLASEKDVREHRFVKDTIYRELQPVCSEIDMQEEVGVLQLNRLAHLYARCRARLRPEFRNDSTVLRQLHPTPAVGGVPREEAMELILSVEPFCRGWYAAPVGWLSRDAAEFAVGIRSALIFEDKVYLYSGAGLVRGSDPESEWEEVDQKIGDILAITRQGR

SEQ ID NO: 93627 - protein, 485 aa, Chlorobaculum sp.
  REGION 1..485: note = tr|A0A4V1M9S8|A0A4V1M9S8_9CHLB Isochorismate synthase MenF OS=Chlorobaculum sp. 24CR OX=2508878 GN=menF; PE = 3 SV=1
MNGTCRTMCLTRPENESRNPMPADDSILMMQKALQLLEESVKTAMQQPSAGNGRPVLERFSAPLDEIDATRWLSAQRLFPKLFWMNREKSEWIAGIGEADRIEISETGPNDRSFLVLDEAMKQKNPHARYFGGFCFNNLQKQNKLWSAFSPGLFILPLVSIEQRDGQTAMACSLWLKPGDNRQQALENLLLALSKVSAGEPPAAAAIPEMTQVCYCPDKPHWVESCETILRNFDEGKLDKVILARQTELSFAGKVPAIRFLLDYPFPDNSTYRFYFEPVEGHAFISFTPERLYRRDGDMLETEALAGTITKEVLKADDSAASELLLASEKDVREHRFVKDTIYRELQPVCSDIDMQEKVGVLQLNRLAHLYARCRARLKPEFRNDSTVLRQLHPTPAVGGVPREEAMTLILSAEPFCRGWYAAPVGWLSQDAAEFAVGIRSALVNDDRVYLYSGAGLVKGSDPESEWEEVDQKIGDILAIMQQTT

SEQ ID NO: 93628 - protein, 488 aa, Chlorobaculum tepidum
  REGION 1..488: note = tr|Q8KBE9|Q8KBE9_CHLTE Isochorismate synthase MenF; OS = Chlorobaculum tepidum (strain ATCC 49652 / DSM 12025 / NBRC 103806 / TLS) OX=194439 GN=menF PE=3 SV=1
MSGTCKTMCLTRPENEPRNPMQADDSIPMMQKALQLLEASVKAAMRQRDGSPAVSGQPMLERFSAPLGEVDATRWLSAQRLFPRLFWMNREKSEWIAGIGEADRIEITESGPNDRSFLVLEEAMTRKNPHARYIGGFCFNNLQKQNKLWSAFSPGLFILPLVSIEYRDGQTLMTCSLWLEPGNDRQKGLEQLLAALSAVSAGDAPETAGIPEMTQVSYCPDKAQWIENCETILRNFDEGKLDKVILARQTELSFAGKVPAIRFLLDYPFPENTAYRFYFEPVEGHAFISFTPERLYRRDGDMLETEALAGTVTKEALKADDSIASELLLNSEKDIREHRFVKDTIYRELQPVCSDIDMQEKVGVLQLNRLAHLLAKCKARLLPEFSNDSTVLRQLHPTPAVGGVPREKAMSLILSIEPFCRGWYAAPVGWLNRDAAEFAVGIRSALVNDDRVYLYSGAGLVRGSNPESEWEEVDQKIGDILAITQQTS

SEQ ID NO: 93629 - protein, 488 aa, Chlorobaculum thiosulfatiphilum
  REGION 1..488: note = tr|A0A5C4S6B8|A0A5C4S6B8_CHLTI Isochorismate synthase MenF OS=Chlorobaculum thiosulfatiphilum OX=115852; GN = menF PE=3 SV=1
MRGTCRTMCLTRPENEPRNPVPADDSFFMMQKALQLLEESVKAAMRQRDGSPAVSGQPVLERFTAPLGEVDATRWLSAQRLFPRLFWMNREKSEWIAGIGEADRIEISETGPNDRSFLVLDEAMQRKNPHARYIGGFCFNNLQKQNDLWKAFSPGLFILPLVSVEYRDGQASMSCSMWLKPGDDRQKALEQLLLTLSEVSAGDAPEAPAIPEVTQVAYCPDKTRWIENCETILRNFDEGKLDKVILARQTELSFAGKVPAIRFLLDYPFPENTAYRFYFEPAEGHAFVSFTPERLYRRDGDMLETEALAGTVTKEALKADDSAASELLLNSEKDIREHRFVKDTIYRELQPVCSDIDMQEQVGVLQLNRLAHLLARCKARLLPEFSNDSTVLRQLHPTPAVGGVPREKAMSLILSIEPFCRGWYAAPVGWLSRDAAEFAVGIRSALVNDDKVYLYSGAGLVRGSNPESEWEEVDQKIGDIMAITQQTS

SEQ ID NO: 93630 - protein, 482 aa, unidentified
  source 1..482: note = Chlorobium chlorochromatii
  REGION 1..482: note = tr|Q3APX3|Q3APX3_CHLCH Isochorismate synthase MenF; OS = Chlorobium chlorochromatii (strain CaD3) OX=340177; GN = menF PE=3 SV=1
MPTTTPNDESHIHLTTREQLPLAIALEHLKDSVKAIRRSLPYHKAQKAQVITCVEAIEPIEPLHWLYVQQLYPRLYWKNREQNNEVAAVGIADSFTAKDDDNNNSAFAAFQAACDERSPALRYFGGFRFNGAELSEEHWKHFPPFFFFLPLVTVERFADQRYTVSANLFLAVGDSVDEKINQLIAFIEQLNSRIDNESVLNTLLPSVEHITRTPNKAAWNAGCEKALNAFENGELEKIMLARQTTLRFTHTFSPLLFLLRYPYPHNAIYRFYLELAPNQAFFSFTPERLFRRHESMVETEALAGTCSKELLQATDQHASQTLLGSEKDVREHNYVREMIYQELLPICSSIDMEDEVQVLQLQRLAHLYTRCSATLKEKSIPTSDILKQLHPTPAVGGVPKEEILEHIRALEPFTRGWYAAPVGWVDSHHAEFAVAIRSGLVNGNEVHLYSGAGLVKGSNPDAEWEEIEQKIGDLLSITRMKQ

SEQ ID NO: 93631 - protein, 474 aa, unidentified
  source 1..474: note = Chlorobium ferrooxidans
  REGION 1..474: note = tr|Q0YUD5|Q0YUD5_9CHLB Isochorismate synthase MenF; OS = Chlorobium ferrooxidans DSM 13031 OX=377431 GN=menF; PE = 3 SV=1
MMSEHYHTITPSAELLSIEKAVASLKTALSLYDDKLDAGRDHKNHLVTFSQPVLPADLPVWLSVQTIYPRVFWMNREKDYAVAGIGIADTITYDGEGNNDEMFRQFERSIARTTPQARYFGGFHFNNSERQDPIWKEFSSFSFVLPLVQLTFENEHYSLSCHLWLEQGDDVITKIRELTEVLDRVVTNTDCSASKLPELLNISYNPDETRWIELCRKALRTFTSGEMEKIMLARQTILEFSTTLSPLLFLLRYPYPENAIYRFYFEPAENRAFFSFSPERLYRRKGNQLLTEALAGTCSKEMIKGGDHHASEALLNSEKDIREHNFVRAMIYEDLFPICREIDMEEDVCVMQLNRLAHLYTRCSATLKPEFENDSDVLKRLHPTPAVGGVPKEPALQHIMELEPFSRGWYAAPVGWISRDAAEFSVAIRSALVNGRFTYLYSGAGLVTGSDPLSEWNEVDQKIGDILTITRQEA

SEQ ID NO: 93632 - protein, 473 aa, Chlorobium limicola
  REGION 1..473: note = tr|B3EG67|B3EG67_CHLL2 Isochorismate synthase MenF; OS = Chlorobium limicola (strain DSM 245 / NBRC 103803 / 6330) OX=290315 GN=menF PE=3 SV=1
MLMREQQNIIIPEQEPLPIDRAVAALRKAIQAYDPSAVNRSPALSIFRQRVLPADPLIWLFRQRVFPRVFWMNREKDCTLAGIGSADWIRHEAEGSNSDSFDLLVRTLSEKDPAVRYIGGFRFNNMESQDETWSAFPSFSFVLPLVLYAEERDGSWLSCHLFVKEGEDSGRKKTVLLQTLEALDLKADAAIPEMPLLKQASCIPDRKLWVEGCRKALGLFASGEMDKIMLARRTVLEFGSSFSPLLYLIRYPYPRNATFRFCYEPMENHAFISFTPERLYRRDGQMILTEALAGTCLKESMNGNDFHASEILLNSEKDIREHGFVKEAIFRALQPVSSSFEMEQNLRVLQLNRLAHLYTCCKATLKPEYSSDSTVLSVLHPTPAVGGVPKNEAMQHILDLEPFCRGWYAAPVGWISRDSAEFAVGIRSALVSEEFTNLYSGAGLVEGSDPDLEWDEIEQKIGDLMAIARGSHE

SEQ ID NO: 93633 - protein, 471 aa, Chlorobium phaeobacteroides
  REGION 1..471: note = tr|B3EMZ4|B3EMZ4_CHLPB Isochorismate synthase MenF; OS = Chlorobium phaeobacteroides (strain BS1) OX=331678; GN = menF PE=3 SV=1
MDKPTDIFEHVSAPLPMKKAVSELRKKVLHHAASAESASEPHLHTFSVPVSISDPLLWLHGQDTYPKFFWSNREKNDIIAGTGLADRIDYDRTGTNSASFDKLQKAVSEKDPEARYFGGFCFNNEQKQDEQWKAFKSFTFILPLIQLSVINGKPALTCHLILDPEENTTEKYTLLLDAIDAINTSDAPDNTGIPEILSLSFSPDQKQWMETCELVLERFRKGLIGKIILARQTLLEFDHSFSPLLFLLRYPFPESSTYRFYFEPEKNTAFFSFSPERLYRRDCDLLLTEALAGTCSRETMDNGSEEACKQLLNSEKDIREHKFVKDAIARELKPICNVIDMEESVRALQLNRLVHLYTQCSASLKPEKNNDAAVLKTLHPTPAVGGVPKDEALEQIIRLEPFSRGWYAGPVGWISRNSAEFAVGIRSAVGSGNKVYLYSGAGLVKGSDPASEWEEVDHKIADILAITRQNV

SEQ ID NO: 93634 - protein, 474 aa, Chlorobium phaeovibrioides
  REGION 1..474: note = tr|A4SD61|A4SD61_CHLPM Isochorismate synthase MenF; OS = Chlorobium phaeovibrioides (strain DSM 265 / 1930); OX = 290318 GN=menF PE=3 SV=1
MHEKHHIIIPFPNPLPVEQAVQALKASLLEYTTLTADTPVEKPGTLAVFRQNIPALDPLKWLSAQSLFPRIFWMNRERDDMTAAIGAADTITHEEAASNEENFRRLGTAMAGKSPHARYFGGFRFNSSETGDPAWEAFPPLSFTLPLLQLSREGSLHTLTCNLWITAADGTKAAVHRAIKALDQLQSAPTQSDDELPSLLSVTHNPTRDGWINACETALNAFASGSMQKIMLARQTVLEFTEAFCPLLFLQNYPYPENTTYRFYFEPSPGQAFFSFTPERLYRRSGRSLVTEALAGTHSKKSEEQEDSYARDALLNSEKDIREHRFVRDMIYDELRPACSSVDMEEEVRVLQLNRLAHLYNLCRAELKEEFSNEPAVLSLMHPTPAVGGVPKKEAMRRIPDLESFSRGWYAAPAGWVSSNSAEFCVGIRSALVNGRTAYLYSGAGLVKGSDPAAEWDEVEQKIGDLMSITRQKA

SEQ ID NO: 93635 - protein, 470 aa, Chlorobium sp.
  REGION 1..470: note = tr|A0A4R0QWD0|A0A4R0QWD0_9CHLB Isochorismate synthase MenF OS=Chlorobium sp. N1 OX=2491138 GN=menF PE=3; SV = 1
MSDQHIITPQDTPLPIVQAAEAIDSALQALDAVGAGRPTGTLVEFRQKVEPIDPMRWLARQKAWPKIFWRSRERDFTAAGLGSADTVSFAGREPNASVFRRLGETMGTKKHDARYFGGIAFNSLEAEREEWKRFPAFSFILPLVELTEENGEQSLCCRIVPGTREETAERAAEARRILSALKGPLTDEAAGIPAVRSRSCSPDREGWIRNCQRAIETFEEGSTEKIMLARRTTLEFAAPFDPMLILLRHPYPKNATYRFYFEPEEGCAFLSFTPERLYRRDGRRLLTEALAGTCSKENAELSDECASRALLASEKDLREHRFVKDMIESELQPACRRIEMEDDVQVLQLNRLAHLYARCTAELKPECAGDGQVLSILHPTPAVGGVPKEEAMRRILEFEPFARGWYAGPVGWISRDSSELAVGIRSALVQSATACLYSGAGLVRGSDPELEWAEVEQKIGDLVAITGATP

SEQ ID NO: 93636 - protein, 437 aa, unidentified
  source 1..437: note = Chloroflexi bacterium
  REGION 1..437: note = tr|A0A358QPG1|A0A358QPG1_9CHLR Isochorismate synthase OS=Chloroflexi bacterium OX=2026724; GN = DEG26_10845 PE=4 SV=1
MTAASPGAILPRRAGDPGADLDLLASWRSGGFLMEREGTGVVTLGELRRIEVPAGRGQASRAASLADAALADLHVDGAVIAAALPFAGDAPAHLLVPERVRVTSIAPRELDLAARDGRQAAAFAPSRSAAQAAAERGAHRAPPSTSARIEPMRWRAHPPLDAYAGAVAEAISRIRAGRLEKVVLARSLVASNPGMETRALLAELRRRDPGCHLFAAPAFAAGEIGDFVGATPETLIRREGDRVLSLPHAGTAARSPDPARDRQVAEALLLSAKNRHEHAAVVEAVADALQPHCAELRVDPEPHLAATATVWHLATAVRGRLRPSAPGALSLAAALHPTPAVCGTPTAAAAELIAELEPGSRGLYAGLVGWVDSRGDGEWAVSLRCALVTRAAVRIHAGAGIVAESQPDLEVAETEVKFRTLIDALEACPPAAGGAPE

SEQ ID NO: 93637 - protein, 478 aa, Chloroherpeton thalassium
  REGION 1..478: note = tr|B3QUU3|B3QUU3_CHLT3 Isochorismate synthase MenF; OS = Chloroherpeton thalassium (strain ATCC 35110 / GB-78); OX = 517418 GN=menF PE=3 SV=1
MIECKTEQHIKICGKEIATVQNAARTIQQLIDENIPELTETIAQPTLVSFQISLENCDPLSWLSQQASTTRLYWSDREASYEVAAAGETDRLFAEGEPHLTELILELQRRLASSSEDIRYYGGLKFDSSSPADHDWKPFGALLFVLPRYEMTKSQHGNTFTINLVIQHGNEVEQQLLAEIQTLQTLCSAAPVSSQPLPIASIRTDSPNQKEWQEIIDKSIQAFDSGCMEKIVLARKTTMVFSEELDPIRLLKQLKDVVNRAFHFYFQFDGTPGFIGATPERLYKRIGETIFSEAVAGTRPRGNSPEADLAFAEDLLNSDKDVREHQFVCKSILDVMDELCTDIQSPAQVSLLKLARVQHLYNKYSATLKKGYGDADLLERIHPTPAVGGVPKKEAIRQIAALEPFDRGWYAGPIGWLSRNESEFAVGIRSALMMKNQLHIYTGAGIVKGSEAESEWEEIENKLGSFLAIQQVNGTENA

SEQ ID NO: 93638 - protein, 394 aa, Chromobacterium sp.
  REGION 1..394: note = tr|A0A0J6RA27|A0A0J6RA27_9NEIS Isochorismate synthase OS=Chromobacterium sp. LK11 OX=1628212; GN = VK98_18625 PE=4 SV=1
MNQTSLDPAYSGEHNLLAAYQADSAFFFASPCHTLLAEGIQRVITDADPSAAIAAALASQPDPEQAVVVGAIPFMPEQQPWLFVPQQVRRADALKQEQRSALRQPLQAECRLTPQPAPAAYCQGVSDALARIGSGALDKVVLSRTLELSAEQAIDQRQLLLNLASQNQHGYTFAVQLSEDGAPRRALMGASPELLLARYGHQVITNPLAGSAARSPDPAEDRRRADALLESGKDLYEHKLVIDAVVEALAPYCRDLQVPAGPSLVSTATMWHLSTRISGELIDPAVSSFELARALHPTPAVCGFPADPARSLIREIEPFDRGFFTGMVGWCDGKGDGEWAVTIRCAEIAERTLRLFAGAGIVTGSLPESELAETAAKFRTMLRAMGLADLAEAA

SEQ ID NO: 93639 - protein, 392 aa, Chromobacterium violaceum
  REGION 1..392: note = tr|Q7NXZ1|Q7NXZ1_CHRVO Isochorismate synthase EntC / MenF OS=Chromobacterium violaceum (strain ATCC 12472 / DSM 30191 / JCM 1249 / NBRC 12614 / NCIMB 9131 / NCTC 975 7); OX = 243365 GN=entC PE=4 SV=1
MHTASALTGNAEDGEFYFMSSHRSLKAGGVHSRIRTPARGALDPRSAFSLEVAEAFARARAGGIESPVLMGAIPFDIDQPSELFIPARHAFFDRGERLLAAAQRAGDGGKVVSARSIPDEQGFKAAVSQAIEQFGRGEIRKAVLSRVLEVDFERPVSAERVFDAVCAQNPNGYQFQLPLADGGHLVGVSPELLLQKDGARVRTFPLAGSAKRQGDPAADAAASAKLLDSAKDHYEHSLVIDDIRDVLAPYCSRLDIPAAPTLLATRAMWHLGSPIDGVLSDPSLPILQLACRLHPTPAICGFPTQASRQLIREIEPFERGVFSGIVGWCDEHGNGEWAVTIRCATVAQRRVRLFAGAGIVAASTPEAEWAETQAKLGTMLGAFGLSGQEAVA

SEQ ID NO: 93640 - protein, 295 aa, unidentified
  source 1..295: note = Chroococcales cyanobacterium
  REGION 1..295: note = tr|A0A3N5INR5|A0A3N5INR5_9CHRO Isochorismate synthase (Fragment) OS=Chroococcales cyanobacterium metabat2.561 OX=2485785 GN=EHM73_09475 PE=4 SV=1
EETINNLKIIQYNSSNCRQNTHQDPCSYYIHPTYNFQAAVGDALQSIQAQKFSKIVLAHALDVISPRPFHLVNCLDNLRQRHPDCYTFSLGNGRGDHFIGASPERLLTVHQGQLITDALAGSAPRGENAIEDALLANKLLASEKEQREHRAVSDFINQKLRQIGLNPQNSPSRLLKLSNIQHLWTPIHAKLKPSIHPLEIVAQLHPTPAVAGVPTEIALAQIRHYETFDRSLYAAPLGWIDCQNNSEFIVGIRSALIKGDRARLYAGAGIVAGSDPEKELAEIQLKFQALLKALT

SEQ ID NO: 93641 - protein, 469 aa, unidentified
  source 1..469: note = Chroococcidiopsis thermalis
  REGION 1..469: note = tr|K9U4C6|K9U4C6_CHRTP Isochorismate synthase; OS = Chroococcidiopsis thermalis (strain PCC 7203) OX=251229; GN = Chro_4084 PE=4 SV=1
MLLLPRPANYHLNCQKLYQFLVASQKNCDRNCSQIVSISLEIDSIDPLALLEKLARPHQLNFYFENKSKGEAIAAIDAVAQLQLAGANRFHLTQKFIRSCLKETDIFDSSNHTFAKPYFFCSFSFFSEATADYPFPVATVFLPRWQIARQGDRCVLVANLSIEADTNIDVFIQQLWRKIHEITSIEQPENEGNHFQREFSQVDVSSIDRFKQAVIDCSELIYEQQLSKVVLAHAIDVQANTNFNLFKCLNRLRQMHPDCYVFSTHNGKGQNFIGASPERLISIRDRQLFTDALAGSISRGKTTAEDTVLANQLLQSEKERHEHRVVIDFITQSLQELGIAPQLLSPRLRRLANIQHLWTPIQAKVPIDVHPLEIVAALHPTPAVGGVSRQLACKKIRTYEKFERGLYAAPLGWVNHQGDSEFIVGIRSALIDGDRARLYAGAGIVAGSNPDREIAEVRLKLQALLKALI

SEQ ID NO: 93642 - protein, 323 aa, Chryseobacterium antarcticum
  REGION 1..323: note = tr|A0A448NV49|A0A448NV49_9FLAO Isochorismate synthase entC OS=Chryseobacterium antarcticum OX=266748; GN = entC PE=4 SV=1
MLYFRFPFSDEIFTTDDSSAQNAVSFVSFDGLNELNFKGEIKEVPRDTFLAQGNSMKTTASKLCVFRPETKKDYEQKINKVINFVKNENLSKLVISRRKLVSYEGSKPNFSKTFLNLCEAYPNAFVYFFTKNNQSWMGAFSEVLGSFNKKTLEFETMSLAGTTQIDETWTRKELAEQRHVTDYISNILKDYSVDVTKSETYDHPSGNIKHLRTDFKAKIKSQDLEKIIAELHPTPAVCGFPKKFCQQAIAKFEEHRRSFYAGYIKVETAETIQYFVNLRCAEFFQNVALIYVGGGITAESSSEKEWQETELKAEAILKNLSFF

SEQ ID NO: 93643 - protein, 322 aa, Chryseobacterium gleum
  REGION 1..322: note = tr|A0A3S4M0D4|A0A3S4M0D4_9FLAO Menaquinone-specific isochorismate synthase OS=Chryseobacterium gleum OX=250; GN = menF PE=4 SV=1
MIYFKLPFDERLLTTDEKNTKNAVHFFSYNGQDQISFSGDIIEAETSEFSLIPITNEDLIKDLTNSTAETKEEYCATLQEVIKVIKENNLPKLVYSRRKIFTDFTVIDYKESFKNLCDSYPNAFRYLFNNGQNAWMGAFSEVLGKFNKTTNEFETMALAGTLPVSEEWSEKEIEEQKPVTTYIQNILKNYSNNVQQSETYDHISGNIKHLRTDFKTSIKPEDLDSIIRDLHPTPAVCGIPKDFCNENIRKYEKFPREFYAGYIKVETEESIFYFVNLRCARLYKDAVHIFVGGGITAQSNPEKEWRETELKSEAILKNLVIL

SEQ ID NO: 93644 - protein, 332 aa, Chryseobacterium indologenes
  REGION 1..332: note = tr|A0A4U8VPD9|A0A4U8VPD9_9FLAO Isochorismate synthase entC OS=Chryseobacterium indologenes OX=253; GN = entC PE=4 SV=1
MIFKTYPKPMIYFKLPFDERLYSADEKNNKNTIDFYSYDSLNQINFNGNKIEVSSEDFDQISISNGSFPEDNTGFIAETDEEYYQNLQQVIRVIKENDLPKLVYSRRKIFTDFNTIDYKKSFTNLCASYPNAFRYIFHEGQNAWMGAFSEVLGKFNKTTHEFETMALAGTLPVSEEWSEKEIEEQKPVSTYIRGILKQYSGEIEQSGTYDHISGNIKHLRTDFKTHIKPGDLDALIRDLHPTPAVCGIPKDFCNENIRKYEKFPRELYAGYIKVETEESILYFVNLRCARLYKDAVHIFVGGGITDQSQPQKEWTETELKAEAILKNLVIDK

SEQ ID NO: 93645 - protein, 324 aa, Chryseobacterium indoltheticum
  REGION 1..324: note = tr|A0A381F9H0|A0A381F9H0_9FLAO Menaquinone-specific isochorismate synthase OS=Chryseobacterium indoltheticum; OX = 254 GN=menF PE=4 SV=1
MIYFKFPFDEQLYSTDENSNTNSINFHSFNNAERIDIAGKIIKKNITEFENLKITSEILPKDESQFIAETQEEYLQKLEEVIQIIKENDLPKLVLSRRKILTGFTEINLKESFNNLCRNYPNAFKYLFFDGETSWMGAFSEVLGKFNKSTHEFETMSIAGTIPVSEEWTEKEIEEQKPVSSYIRNTLTKYATLSEVQESETYDHISGNIKHLKTDFKIKINPEDLDSIIKELHPTPAVCGIPKDFCREIIEKVEKFPRELYAGYIKIETEDYIQYFVNLRCARLYKNSVHLFVGGGITAQSNPKKEWQETELKSQAVLKNLVVI

SEQ ID NO: 93646 - protein, 322 aa, Chryseobacterium jejuense
  REGION 1..322: note = tr|A0A2X2VC21|A0A2X2VC21_9FLAO Menaquinone-specific isochorismate synthase OS=Chryseobacterium jejuense; OX = 445960 GN=menF PE=4 SV=1
MIYFKLPFNEGLHTVEETADKNAVNFHSYNSLNQINFNGNIIKVESANWNEVSITNESLANDTTDFTAETKEEYCSTLEQVIEVIKENDLPKLVYSRRKIFTDFNTIDFKASFDNLCTTYPNAFRYLFNDGENAWMGAFSEVLGKFNKATHEFETMALAGTLPTTEEWTEKEIEEQKPVTTYIQNILKNYSDQVQQSETHDHVSGNIKHLRTDFKTTIKPSDLDRLIQDLHPTPAVCGIPKDFCNENIRKYEKFPREFYAGYIKVETDENILYFVNLRCARLYRNAVHVFVGGGITAQSNPEKEWIETELKSEAILKNLVVS

SEQ ID NO: 93647 - protein, 322 aa, unidentified
  source 1..322: note = Chryseobacterium nakagawai
  REGION 1..322: note = tr|A0A448LKZ2|A0A448LKZ2_9FLAO Menaquinone-specific isochorismate synthase OS=Chryseobacterium nakagawai; OX = 1241982 GN=menF PE=4 SV=1
MIYFKLPFNEGLHTVEETTDKNAVNFYSYNNLNQINFNGNIIKVDASKFNNITITNESLVKDTTAFTAETKEEYCNTLQQVIEVIKENDLPKLVYARRKIFTDFNTIDYKASFDKLCQSYPNAFRYLFNDGENAWMGAFSEVLGKFNKITHEFETMALAGTLPTSEGWTEKEIDEQKPVTTYIQNILKNYSDNIQQSETYDHISGNIKHLRTDFKTIIKPNDLDSLIKDLHPTPAVCGIPKDFCNENIRKYEKFPREFYAGYIKVETEESVLYFVNLRCARLYKGSVHIFVGGGITAQSNPEKEWTETELKSEAILKNLVVS

SEQ ID NO: 93648 - protein, 321 aa, Chryseobacterium shigense
  REGION 1..321: note = tr|A0A376DQM6|A0A376DQM6_9FLAO Isochorismate synthase entC OS=Chryseobacterium shigense OX=297244; GN = entC PE=4 SV=1
MIYFKLPFNETLYSTDQKQGSESISFHSFALLRQIGFEGNITEASEPFEPKEMTSEVLLKDESHFTEETKEEYTNTLQQVIDVIKNHDLPKLVYSRRKIFRDFNGIDYKESFKKLCITYPNAFRYIFNDGENAWMGAFSETLGKFNKTTHEFETMSLAGTLPVSEEWTEKEIEEQKPVTSYIKDILENYSANLQLSETYDHISGNIKHLRTDFKAHIRPEDLDNLIHELHPTPAVCGIPKDFCKKSIQQFEKFPRELYAGYIKVETDEWVMYFVNLRCARLYKDSVHIFVGGGITAQSDAEKEWRETELKSEAVLKNLVVS

SEQ ID NO: 93649 - protein, 326 aa, Chryseobacterium sp.
  REGION 1..326: note = tr|A0A1A7KCU1|A0A1A7KCU1_9FLAO Menaquinone-specific isochorismate synthase OS=Chryseobacterium sp. MOF25P; OX = 1664318 GN=menF PE=4 SV=1
MIYFKFPFDEKLYSTDENSNTNSINFHSFNNAEKIDIAGKIIEKNLTEFENLKITSEILPKDESQFIAETQEEYLQKLEEVIQIIKENDLPKLVLSRRKILKDFNKIDLKNSFNNLCKNYSNAFKYLFFDGETSWMGAFSEVLGKYNKSTHEFETMSIAGTIPVSEEWTEKEIEEQKPVSSYIRNILEKYRDSHSIQESETYDHISGNIKHLKTDFKIKINPENLDSIIQELHPTPAVCGIPKDFCREIIEKVEKFPRELYAGYIKIETEDYIQYFVNLRCARLYKNSVHLFVGGGITAQSNSEKEWNETELKSEAVLKNLVIIHS

SEQ ID NO: 93650 - protein, 323 aa, unidentified
  source 1..323: note = Chryseobacterium taklimakanense
  REGION 1..323: note = tr|A0A239X5C9|A0A239X5C9_9FLAO Menaquinone-specific isochorismate synthase OS=Chryseobacterium taklimakanense; OX = 536441 GN=menF PE=4 SV=1
MIFFKFPFGENFLSVDNKPDCTNVSFVSFTGENQLDFEGNVKEINDLPEVFSDDLSNITLEFPNEDQEKYVGKISSVIDFIKENDLKKLVIARQKLVPYGRLNDAGKINLTQTFLNVCRAYPNAFAYFFNKDGKCWIGAFSEVLGKFNKETSEFETMSLAGTLPVNENWTAKEIEEQKPVTAYISTILKNYSEHVEQSETTDHISGNIKHLRTDFKAKTDKKDLEKLISDLHPTPAVCGIPKDFCKNAIEKFEVLPRQFYAGYIRVETESHIQYFVNLRCAEFTKNAAIIYVGGGITAQSNPEKEWYETELKSEAILKNIAIS

SEQ ID NO: 93651 - protein, 397 aa, unidentified
  source 1..397: note = Ciceribacter sp.
  REGION 1..397: note = tr|A0A4Q2TT02|A0A4Q2TT02_9RHIZ Isochorismate synthase OS=Ciceribacter sp. F8825 OX=2509717; GN = EUU22_02395 PE=4 SV=1
MVHPSTLNDILPEDRAFPANRPSYVLRSGDETLLAYGVARELPGGTISDLASRVRRHFEEYPTGPDILVGAIPYAREASAYLLRPEKALRVMGRHELGVPGGHLAPQGFAMQVTADPSADAFSAAVARGLARLCEDGGSLRKIVLSRSVRLAVGNDISIPALIARLAVDDAVVTFATPLPPREGSPRFLVGATPELLVERRGPRVFSHPLAGSARRSPDSVHDREAAEALLRSEKDRREHALVVEQIMDVLSPLCTDLAAPDGVMLKATRSMWHLGTRIKGTLKDIGTSSIELAALLHPTPAVCGMPRSEADAAIRDLEGYDRGFYAGAVGWCDSSGDGRWYVSIRCAEIEGRNARLYAGAGIVPGSTPEGELAETAHKFSAMLEAFGLSVAQIGEA

SEQ ID NO: 93652 - protein, 468 aa, Citricoccus sp.
  REGION 1..468: note = tr|A0A4P9J9S3|A0A4P9J9S3_9MICC Isochorismate synthase OS=Citricoccus sp. SGAir0253 OX=2567881; GN = E7744_03585 PE=4 SV=1
MSNPGPGAPAPRLASITFARPVPGGGPLADLLATGDECAWIRFGDGLVGLGTAARFTTTGPDRFAAARRWWKAATAAEAADTPRSSVPDDGPPRRSPLAFAAFAFADDSPVDSVLVVPEVVVGSSRGRSWLSWQVDLDAPAYAARAAAGWRPTVAEAEDRLSTLLAAARRRRAAAGPGAPGTPVLADGAITPEGYREAVVRGVGHIEAGTLSKLVLARDAVVRTPGPLDVPGVLRTLSRRYRDCWTYAVGGLVGSTPEMLVKVDGDTARARVLAGTLDRDGAPAGADGADHARRHLSEDPKQRLEHRLAVESLTERLQPFTTALEAPDEPFVLELPNVWHLATDVTARLVGADGARRTGPGALALTEVLHPTAAVCGTPRETAAALIHRLEAEDHGMDRGLFAGPVGWLDGNGNGEFGIALRGAVVEDAHTARLYAGCGIVAASDPAAELAETTAKMRPMLQALGLCD

SEQ ID NO: 93653 - protein, 432 aa, Citrobacter amalonaticus
  REGION 1..432: note = tr|A0A515AIR2|A0A515AIR2_CITAM Isochorismate synthase MenF OS=Citrobacter amalonaticus OX=35703 GN=menF; PE = 3 SV=1
MHSLTTALEGLTRLLSQAIPAAPGIRVLDVPFPLNDAFDALSWLASQSIYPQFYWQQRNGDEEAAVLGVVAPFSSLDEAQCFLRQHPQQTDLRIWGLNAFDPEQGNLVLPRLEWRRCAGVAVLRLHLWSDVSLREDADRALTFLASLASVKPLPTLRLSKTAEQHWPEKAGWITLIEQATQTIAEGELDKVVLARASDLHFSRPVNAAAVMASSRRLNLNCYHFYMAFSAQSAFLGSSPERLWRRRDTALRTEALAGTVANHPDDYKAWQLGEWLMKDDKNQRENMLVVEDICQRLQDYTHTLDVLPPQVLRLRKVQHLRRCIWTALNQADDTLCLLQLQPTAAVAGIPRERARAFIQQREPFAREWYAGSAGYLSLQQSEFCVSLRSAKISGNVVRLYAGAGIVRGSDPEQEWQEIDNKAAGLRSLLQMDG

SEQ ID NO: 93654 - protein, 432 aa, Citrobacter braakii
  REGION 1..432: note = tr|A0A1V8P3L2|A0A1V8P3L2_CITBR Isochorismate synthase MenF OS=Citrobacter braakii OX=57706 GN=menF PE=3; SV = 1
MHSITTALESLMRHLSQEIPAAPGIRIYDIPFPLNDAFDALGWLASQPVWPQFYWQQRNGDEEAAVLGAVATFSSLELAQHFLHQHNDNPDLRIWGLNAFEPQRGHLLLPRLEWRRCAGVASLRLHLFSDVSLREDAAQAVAFISSLANVKPLPALRLRLTGEQNWPDKTGWTDLIKLATQTINGEQLDKVVLARATDLQFSQSVNAAAVMASSRRLNLNCYHFFMAFSAKCAFLGSSPERLYRRRDTALRTEALAGTVANHPEDHRAWQLGEWLMKDDKNQRENMLVVEDICQRLQGCTQTLDVLPPQVLRLRKVQHLRRCIWTELNQADDTLCLMQLQPTAAVAGIPRELAREFIQQNEPFEREWYAGSAGYLSLRQSEFCVSLRSAKISENVIRLYAGAGIVRGSDPEQEWQEIDNKAAGLRTLLQMEG

SEQ ID NO: 93655 - protein, 432 aa, Citrobacter farmeri
  REGION 1..432: note = tr|A0A223JUN3|A0A223JUN3_9ENTR Isochorismate synthase MenF OS=Citrobacter farmeri OX=67824 GN=menF PE=3; SV = 1
MHSLTTALEGLTRLLSQAIPAAPGIRVLDVPFPLNDAFDALSWLASQSIYPQFYWQQRNGDEEAAVLGVVAPFSSLDEAQRFLRQHPQQTDLRIWGLNAFDPQQGNLVLPRLEWRRCAGVAVLRLHLWSDFSLREDADRALTFLASLTSVKPLPTLRLSKTGEQHWPEKAGWINLIEQATQTIAEGELDKVVLARASDLQFSRPVNAAAVMASSRRLNLNCYHFYMAFCAERAFLGSSPERLWRRRDTALRTEALAGTVANHPDDYKAWQLGEWLMKDDKNQRENMLVVEDICQRLQDYTHSLDVLPPQVLRLRKVQHLRRCIWTALNQADDTLCLLQLQPTAAVAGIPRERARAFIQQHEPFAREWYAGSAGYLSLQQSEFCVSLRSAKISGNVVRLYAGAGIVRGSDPEQEWQEIDNKAAGLRSLLQIDG

SEQ ID NO: 93656 - protein, 432 aa, Citrobacter freundii
  REGION 1..432: note = tr|A0A243TUW8|A0A243TUW8_CITFR Isochorismate synthase MenF OS=Citrobacter freundii OX=546 GN=menF PE=3; SV = 1
MHSITTALESLMRHLSQEIPAAPGIRIYDIPFPLNDAFDALGWLASQPVWPQFYWQQRNGDEEAAVLGAVAAFSSLESAQQFLHQHDNHPDLRIWGLNAFEPQRGNLLLPRLEWRRCAGVASLRLHLYSDVSLRDDAAQAVAFISSLANVKPLPALRLSLTGEQNWPDKAGWTNLIKLATQTIAGEDLDKVVLARATDLQFSQPVNAAAVMASSRRLNLNCYHFFMAFSADSAFLGSSPERLYRRRDTALRTEALAGTVANHPEDHRAWQLGEWLMKDDKNQRENMLVVEDICQRLQGCTQTLDVLPPQVLRLRKVQHLRRCIWTELNQADDTLCLMQLQPTAAVAGIPRELAREFIQQNEPFEREWYAGSAGYLSRRQSEFCVSLRSAKISANVVRLYAGAGIVRGSDPEQEWQEIDNKAAGLRTLLQMEA

SEQ ID NO: 93657 - protein, 432 aa, Citrobacter gillenii
  REGION 1..432: note = tr|A0A3E2KNI0|A0A3E2KNI0_9ENTR Isochorismate synthase MenF OS=Citrobacter gillenii OX=67828 GN=menF; PE = 3 SV=1
MHSITTALENLMRLLTQEIPAAPGIRIYDIPFPLNDAFDALGWLASQPVWPQFYWQQRNGDEEAAVLGAVATFSSLAVAQQFLHQHEDHPELRIWGLNAFEPQRGNLLLPRLEWRRCAGVATLRLHLYSDVSLQDDAVHARAFLSTLANVKPLPALRLNLTAEQHWPDKAGWTRLIELATQTIAGEALDKVVLARATDLQFSQPVNAASVMASSRRLNLNCYHFFMAFSAECAFLGSSPERLYRRRDTALRTEALAGTVANHPDDHRAWQLGEWLMKDDKNQRENMLVVEDICQRLQNCTQTLDVLPPQVLRLRKVQHLRRCIWTALNQPDDTLCLMQLQPTAAVAGIPRERARAFIQHNEPFEREWYAGSAGYLSLQQSEFCVSLRSAKISGNVVRLYAGAGIVRGSDPEQEWQEIDNKAAGLRTLLQMEA

SEQ ID NO: 93658 - protein, 408 aa, Citrobacter koseri
  REGION 1..408: note = tr|A8ADW8|A8ADW8_CITK8 Isochorismate synthase MenF; OS = Citrobacter koseri (strain ATCC BAA-895 / CDC 4225-83 / SGSC4696) OX=290338 GN=menF PE=3 SV=1
MRIVDVPFPLNDAFDALSWLASQAIWPQFYWQQRNGDEEAAVLGAVETFPSLEQAQHFLRQHESQSDLRIWGLNAFEPQQGHLLLPRLEWRRAGAMATLRLYLYSPVSLREDARRAIAFLSSLRGVKPIPALRLHLTGEQHWPDKAGWTSLIQLATQTIAEDDLDKVVLARATDLQFSHSVNAAAVMASSRRLNLNCYHFFMAFSAGSAFLGSSPERLWRRRETALRTEALAGTVANHPDDHQAWQLGEWLMKDDKNQRENMLVVEDICQRLQSCTHSLDVLPPQVLRLRKVQHLRRCIWTALNQADDTLCLLQLQPTAAVAGIPRERARAFIQQHEPFEREWYAGSAGYLSLQQSEFCVTLRSAKVAANVVRLYAGAGIVRGSDPEQEWQEIDNKAAGLRTLLQMES

SEQ ID NO: 93659 - protein, 432 aa, Citrobacter murliniae
  REGION 1..432: note = tr|A0A4S3RR72|A0A4S3RR72_9ENTR Isochorismate synthase MenF OS=Citrobacter murliniae OX=67829 GN=menF; PE = 3 SV=1
MHSITTALESLMRHLSQEIPAAPGIRIYDIPFPLNDAFDALGWLASQPVWPQFYWQQRNGDEEAAVLGATATFSSLESAQQFLRQHEDNPELRIWGLNAFEPQRGNLLLPRLEWRRCAGMATLRLHLYSDVSLREDAARAGAFLSALASVKPLPTLRLNLIGEQHWPDKAGWTRLIELATQTIAREDLDKVVLARATDLQFSHPVHAAAVMASSRRLNLNCYHFFMAFSAECAFLGSSPERLWRRRDTALRTEALAGTVANHPDDHRAWQLGEWLMKDDKNQRENMLVVEDICQRLQNCTQTLDVLPPQVLRLRKVQHLRRCIWTALNQPDDALCLMQLQPTAAVAGIPRELAREFIQHHEPFEREWYAGSAGYLSLSQSEFCVSLRSAKINANVVRLYAGAGIVRGSDPEQEWQEIDNKAAGLRTLLQMEG

SEQ ID NO: 93660 - protein, 432 aa, unidentified
  source 1..432: note = Citrobacter pasteurii
  REGION 1..432: note = tr|A0A0A1RNC4|A0A0A1RNC4_9ENTR Isochorismate synthase MenF OS=Citrobacter pasteurii OX=1563222 GN=menF; PE = 3 SV=1
MHSITTALESLMRILSQEIPAAPGIRIYDIPFPLNDAFDALGWLASQPVWPQFYWQQRNGDEEAAVLGAVATFSSLESAQRFLRQHDNYPELRVWGLNAFEPQRGNLLLPRLEWRRCAGVATLRLHLYSDVSLREDAAQAAAFISTLAQVKPLPALRLILTGEQHWPDKDGWVRLIELATQTIAEEELDKVVLARATDLQFSQPVNAAAVMASSRRLNLNCYHFYMAFSAESAFLGSSPERLYRRRDTALRTEALAGTVANHPNDHRAWQLGEWLMKDDKNQRENMLVVEDICQRLQNCTQTLDVLPPQVLRLRKVQHLRRCIWTALNQADDTLCLVQLQPTAAVAGIPRELAREFIQHNEPFEREWYAGSAGYLSLRQSEFCVSLRSAKISANVVRLYAGAGIVRGSEPEQEWQEIDNKAAGLRTLLSIEG

SEQ ID NO: 93661 - protein, 432 aa, unidentified
  source 1..432: note = Citrobacter portucalensis
  REGION 1..432: note = tr|A0A4P7V9W5|A0A4P7V9W5_9ENTR Isochorismate synthase MenF OS=Citrobacter portucalensis OX=1639133; GN = menF PE=3 SV=1
MHSITTALESLMRHLSQEMPAAPGIRIYDIPFPLNDAFDALGWLASQPVWPQFYWQQRNGDEEAAVLGTVAAFSSLESAQQFLHQHDNHPDLRIWGLNAFEPQSGNLLLPRLEWRRCAGVASLRLHLYSDVSLREDAAQAIAFISSLAPVKPLPALRLSLTGEQHWPEKAGWIDLIKLATQTIAGEDLDKVVLARATDLQFSQSVNAAAVMASSRRLNLNCYHFFMAFSADTAFLGSSPERLYRRRDTALRTEALAGTVANHPEDHRAWQLGDWLMKDDKNQRENMLVVEDICQRLQGCTQTLDVLPPQVLRLRKVQHLRRCIWTELNQADDMLCLMQLQPTAAVAGIPRELAREFIQQNEPFEREWYAGSAGYLSLRQSEFCVSLRSAKISANVVRLYAGAGIVRGSDPEQEWQEIDNKAAGLRTLLQMEG

SEQ ID NO: 93662 - protein, 432 aa, Citrobacter rodentium
  REGION 1..432: note = tr|D2TH10|D2TH10_CITRI Isochorismate synthase MenF; OS = Citrobacter rodentium (strain ICC168) OX=637910 GN=menF; PE = 3 SV=1
MYSFTAALESLTRLLTQEISARPGIRVIDVPFPLNDAFDALSWLASQPVYPQFYWQQRNGDEEAAVLGAVCRFSSLDEAQRFLHQHPQQTDLRIWGLNAFDPRQGFLFLPRLEWRRCAGVATLRLHLCSAVSLREDTERALTFLTSLAGVKPLSTLRLTLTAERRWPEKAGWISLIRKATDTIAADGFDKVVLARASDLHFSRPVNAAAMMAASRRLNLNCYHFFMAFSANSAFLGSSPERLWRRRDTALRTEALAGTVANHPDDYKAWQLGEWLMKDDKNQRENMLVVEDICQRLQHHTQMLDVLPPQVLRLRKVQHLRRCIWTALNQPDDALCLMQLQPTAAVAGIPRDRAKNFIHQHEPFEREWYAGSAGYLSIQQSEFCVSLRSAKITDNVVRLYAGAGIVRGSDPEQEWQEIDNKAAGLRSLLQMDG

SEQ ID NO: 93663 - protein, 432 aa, Citrobacter sp.
  REGION 1..432: note = tr|A0A3S7DE55|A0A3S7DE55_9ENTR Isochorismate synthase MenF OS=Citrobacter sp. CFNIH10 OX=1920110; GN = menF PE=3 SV=1
MHSLTTALEGLTRLLSQAIPAAPGIRVLDVPFPLNDAFDALSWLASQSIYPQFYWQQRNGDEEAAVLGVVAPFSSLDEAQCFLRQHPQQTDLRIWGLNAFDPEQGNLVLPRLEWRRCAGVAVLRLHLWSDVSLREDADRALIFLASLASVKPLPTLRLSKTAEQHWPEKAGWITLIEQATQTIAEGELDKVVLARASDLHFSRPVNAAAVMASSRRLNLNCYHFYMAFSAQSAFLGSSPERLWRRRNTALRTEALAGTVANHPDDYKAWQLGEWLMKDDKNQRENMLVVEDICQRLQDYTHTLDVLPPQVLRLRKVQHLRRCIWTALNQADDTLCLLQLQPTAAVAGIPRERARAFIQQREPFAREWYAGSAGYLSLQQSEFCVSLRSAKISGNVVRLYAGAGIVRGSDPEQEWQEIDNKAAGLRSLLQMDG

SEQ ID NO: 93664 - protein, 432 aa, Citrobacter werkmanii
  REGION 1..432: note = tr|A0A4Q4BMC7|A0A4Q4BMC7_9ENTR Isochorismate synthase MenF OS=Citrobacter werkmanii OX=67827 GN=menF; PE = 3 SV=1
MQSITTALEGLMRHLSQEIPAAPGIRIYDIPFPLNDAFDALGWLASQPVWPQFYWQQRNGDEEAAVLGAVATFSSLASAQQFLRQHDNQPDLRIWGLNAFEPRHGNLLLPRLEWRRCAGVASLRLHLYSDVSLREDAARAVEFISTLANVKPLPALRLSLTGEQHWPDKAGWIDLIKLATHTINGEELDKVVLARATDLQFSQSVNAAAVMASSRRLNLNCYHFFMAFSADSAFLGSSPERLYRRRDTALRTEALAGTVANHAEDHRAWQLGEWLMKDDKNQRENMLVVEDICQRLQGCTQTLDVLPPQVLRLRKVQHLRRCIWTELNQADDTLCLMQLQPTAAVAGIPRELAREFIRQNEPFEREWYAGSAGYLSLRQSEFCVSLRSAKINANVVRLYAGAGIVRGSDPEQEWQEIDNKAAGLRTLLQMEG

SEQ ID NO: 93665 - protein, 421 aa, Citrobacter youngae
  REGION 1..421: note = tr|D4B7C3|D4B7C3_9ENTR Isochorismate synthase MenF; OS = Citrobacter youngae ATCC 29220 OX=500640 GN=menF PE=3; SV = 1
MRHLSHEIPAAPGIRIYDIPFPLNDAFDALGWLASQPVWPQFYWQQRNGDEEAAVLGAVATFSSLGSAQQFLRQHDNQPDLRIWGLNAFEPRHGNLLLPRLEWRRCAGVASLRLHLYSEVSLREDAACAVEFISTLAHVKPVPALRLSLTGEQHWPDKAGWTDLITLATQTINREALDKVVLARATDLQFSQPVNAAAVMASSRRLNLNCYHFFMAFSADSAFLGSSPERLYRRRGTALRTEALAGTVANHAEDHRAWQLGDWLMKDDKNQRENMLVVEDICQRLQGCTQTLDVLPPQVLRLRKVQHLRRCIWTELNQADDTLCLMQLQPTAAVAGIPRELAREFIQQNEPFKREWYAGSAGYLSLRQSEFCVSLRSAKINANVVRLYAGAGIVRGSDPEQEWQEIDNKAAGLRTLLQMEG

SEQ ID NO: 93666 - protein, 424 aa, Clavibacter michiganensis
  REGION 1..424: note = tr|A5CUV6|A5CUV6_CLAM3 Putative isochorismate synthase OS=Clavibacter michiganensis subsp. michiganensis (strain NCPPB 382) OX=443906 GN=menF PE=4 SV=1
MTASRVRALLVDTTPVDSIARLVPLLDARHPLLWLRHGSGMGGIGEAIRLEFRGPDRVRDAAAAWREVAAAATVTDPLGIPGTGLIAFGAFAFADDSEAASVLVVPRLVVGRRDGVSWVTRIRLADQEDGDVASPLDALAAGSIPVPERSGAEYRLHLRPGSMGPDDYETAVARAVAAIAAGDVEKVVLARDLVGRLPLGGDLRLALSRFALGYPDCWTYAVDGLIGASPETLVRVGGGTVGARVLAGTVSRGTDARADAAAAAGLAASRKDNEEHAFARDSVLDALHPHSRDLSTTDAPFTLKLPNLWHLASDVTGTLGDGSSSLDLVGALHPTAAVAGHPTAAALSLIAELEPADRGRYAGPVGWVAADGDGEWAIALRGAQVDPSGAIVAHAGAGIVAGSDPERERAETAMKFRPVVEALG

SEQ ID NO: 93667 - protein, 358 aa, unidentified
  source 1..358: note = Clostridioides difficile
  REGION 1..358: note = tr|A0A4U9SSE8|A0A4U9SSE8_CLODI Isochorismate synthase family protein OS=Clostridioides difficile; OX = 1496 GN=dhbC PE=4 SV=1
MFVLSRPHGTVRGRGAVRGFTDVDAASAALRSGEVGALTGAIPFDLADPAALVVPEVLDFDDAPLAGGPPLSRIPLSTTLHPTADEHRERVAHAVKRIVAGDVGKVVLARSVDIVLDREVAPGELLDALAGGNAGHNAFGVDLGAATGSGSWLFGASPEVLLRKSGSVVTCHPYAGSAPRSPDPVVDRAVADGLFSSAKDLAEHAFVVDHLRDRLSHLCDDVDAPSTPRLQSTGEVWHLATPIRATLRDPATTALDLALLLGPTPAVCGTPSDVAAQIIREVEGERGFYAGAVGWCDAAGDGEWMVTIRCLELEADRRSLRTWAGGGIVEHSDPQGELEETAFKLRTVLNALGIDGLE

SEQ ID NO: 93668 - protein, 387 aa, Clostridium beijerinckii
  REGION 1..387: note = tr|A0A1S8PP53|A0A1S8PP53_CLOBE Isochorismate synthase DhbC OS=Clostridium beijerinckii OX=1520 GN=dhbC; PE = 4 SV=1
MEKKVLLNEINVNKNCLYFSTPEYELYTEQICDKIDFNTATNIPKIVEEFINKGALKGKMIVGAIPFDLEESGCLYVTNKWEVLQIPFKERKIVPSNSIQNNYVVNTKYVPTPERYMKMVEEAVKDIKGGSLDKIVLSRGVDLTFEKQVDVLEILKRLCVDNEAGYTYATNLYNNSFLVGASPEMLVSKRQKHIYSNPLAGSRPRGINANEDKLISEELMTSTKDQKEHKFVVNNIVDKISKICKEVTYQKIPVLIKTKQLWHLSTLIEGTLKDLRQTVLEAAITIHPTPAICGVPQSAAYKKIAELEGYNRGLFTGIIGWCDENGDGDWAIVIRGAQICPNNVKIRAGAGIVQDSEAVSELEETKVKFRTMLNGLGMNDLIERREI

SEQ ID NO: 93669 - protein, 456 aa, Clostridium botulinum
  REGION 1..456: note = tr|A0A0B4W906|A0A0B4W906_CLOBO Salicylate synthase; OS = Clostridium botulinum Prevot_594 OX=1408284 GN=T258_799; PE = 4 SV=1
MNNISDDYKIISYYEEKKLLNKDMYFTAVQICENSFYKDYIMYENNGELSIGIGRFATVIATPDKVTVELMGKTSTFDNEDINTTLHNAFMSIPLKNWRAYGIANFGLAYYNYGLHLTKEDNSLLKMLIPKLEIRLKNGEILIRALNSEDLVKMNEFVEKLNRDIKKEYELEHRIEKSKMMKVNIFDEKAEYYKSIVKKAVEEIKDKKYEKVILSRRILIDEKLDILGSYVAGRRVNNPARSYILNLQGLQVIGYSPETVAEVNKDGVVSTFPLAGTRAVGISEDETNKLKEELLRDPKEIAEHAVSVKLAYEELEKVCELNSVHVNEFMSVLKRGTVQHLASRLKGKLKKEYNEWHGFNALFPAVTASGIPKKEAIEAIERLEEEPRNLYSGSVLTYDSDGTIDAALVLRSIYQDDKHTWLRAGAGIVELSLPERELVETCEKLSSVSKKLISIE

SEQ ID NO: 93670 - protein, 385 aa, Clostridium paraputrificum
  REGION 1..385: note = tr|A0A2X3BI21|A0A2X3BI21_9CLOT Isochorismate synthase family protein OS=Clostridium paraputrificum; OX = 29363 GN=dhbC PE=4 SV=1
MTSEGDECVRGRRGPFDGRPATAPDFLLSRSHGSVRTQGSLATYSDPWLAAERLRRGEHQMIVGAIPFNPERPAALTVPREIIRSEQPLEPPAHYRWNPPEIKARIVGHDPAPEEHLERLDAAIRTIKVSGMDKVVLARAIDLAIDPAIDPLQLSSRLIDGSPNRDGFVADLGPAGGRFTGRMLIGSSPEMLVRRRGRIVEAFPLAGSAPRSRDRAADEAAAAKLMASRKNNEEHEFVVDDIADNLAPLCSHLDVPHEPQLLSTSEMWHLGTFIRGELKDPVISALDLALLVHPTPAICGTPTESAMSVIEAIESDRGFYAGCVGWCDSEGDGEFVVSIRCAEIDAAGTEARLWAGGGIVADSNPEEELAETTAKLRTVLRAFGL

SEQ ID NO: 93671 - protein, 384 aa, Clostridium pasteurianum
  REGION 1..384: note = tr|A0A0H3JAJ8|A0A0H3JAJ8_CLOPA Menaquinone-specific isochorismate synthase OS=Clostridium pasteurianum DSM 525 = ATCC 6013 OX=1262449 GN=menF PE=4 SV=1
MKYHKIQIKLDNPLTFLKYFKNEESFFFYNPLKKEFIFGAKRLKALSLEECLKDYPYTFSSMTFFNSIKDEKWSGFGNENIAFEYYLIEKKGIQTLYYLKDFVEIENMKVEFYRHSFRYEMDDYNSWEQLFSAAHNAILNKELNKVVISREVKIKCNGSINTESILQNLLKQNANSFIFSYRKDGKTFLGATPEILIQKEKNNILSYALAGTVLRSYKEDEGEGEGLLVDIKNRHEHQIVIDSIVNSMRNFTDELTVDETKILELKNLYHLQTCIHGKNTSRTLLQWVKLLHPTPALGGDPVNKALELIKRYEKHERGLYAAPIGIIDENGDGIFVVGIRSALIEKNIVYAYSGCGIVDKSNCKSEYIETTNKLKTIIESLSDK

SEQ ID NO: 93672 - protein, 448 aa, Clostridium saccharobutylicum
  REGION 1..448: note = tr|U5MQ84|U5MQ84_CLOSA MbtI: isochorismate synthase/isochorismate-pyruvate lyase MbtI OS=Clostridium saccharobutylicum DSM 13864 OX=1345695 GN=CLSA_c16880 PE=4; SV = 1
MKYNEFQMNIDLKDNFDKYILATKICSEKKNVNHMLYESDDVIYVGIGEYSSIQVTEDTIVLETQSSVKQWDIKDLNIDLEIAFSEIQLEEWRAYGIANFGLAKFNYGLPLNNESNKLLKLFIPEIEYQITDESLKVRALQEKELNGISEKLKLLIEDIDNVKNTIDMKNKLEIQEIFSYDQEYYKDIVSKGVAEIKNKTYKKVILSRKIPIKENLDMELSYLVGRRANTPARSYILKFDDLQAFGFSPETVAEIDRERNVYTFPLAGTRAFFEDREKSDKLRRELLDDTKEIAEHAVSVKLADEELQQVCKMDTVVVTEFMSIMERGTVQHIGSRLRGTIKDEYNSWYAFNKLFPAVTASGIPKKESIDAIGRLEKDARDLYSGSVLIYDSNGALDAALVLRTIFQNSKETWIRAGAGIIEMSKPKREFEETCEKLSSVSKQLIKKE

SEQ ID NO: 93673 - protein, 381 aa, Clostridium sp.
  REGION 1..381: note = tr|G7M6I9|G7M6I9_9CLOT Isochorismate synthase; OS = Clostridium sp. DL-VIII OX=641107 GN=CDLVIII_4548 PE=4; SV = 1
MKYYEKQISLNNPLSFLKHFRNEEKFLFYNPIKQEFIFGAKRLKTFSANENFNDYLYIFSSMTFFDSIKDTKWDNFGNENIAFEYYLVEKEGKQTLYYFKDFVEIENREIEVCDHSYKYEIDDYKTWKEMFSAVKNKILMKEVNKVVISREIKIQCDTSINAESVLQKLLKQNKNSFVFSYSKEGKVFLGATPEILVQKEGEEVLSYALAGTILRSDENDELQKEKLLKDNKNCYEHQIVIDSITDIMKKFTDELIVDETKILTLKNLHHLQTRILGKSKDTTLLQWVKLLHPTPALGGNPVDKATDLIRRYEKHERGLYAAPIGVVDGNGNGIFIAGIRSVLIEKNMAYAYTGCGIVDKSDCKDEYIETNNKLKTIIESL

SEQ ID NO: 93674 - protein, 485 aa, unidentified
  source 1..485: note = Coleofasciculus chthonoplastes
  REGION 1..485: note = tr|B4VGV3|B4VGV3_9CYAN Isochorismate synthases subfamily OS=Coleofasciculus chthonoplastes PCC 7420; OX = 118168 GN=MC7420_7446 PE=4 SV=1
MYMAYLSSHTDRLPDHKELYQFLVACQQASLEKGCTQIASISVPIPRVDPLAVLQILGGTQSFQFYLEKRKENEAILAIDATIYAELEGINRFQHAKTVIHNYLKDTWIWLQQNQTISFSGPHFFCFFTFFALNQPSPFRAATIFLPRWQVAFRENSGTVVANVQVDPHVNIKRLLQDLYNQIAEIKFSEHKPSSLTRINCSPFIPPKSINTEAFKSAVVAALNFIDANEFSKIVLANAVDIFSHQPFNLVHSLDNLRQRHPDCYIFCASNGKGQNFLGASPERLISIRDHLLVTDALAGSAPRGRTASEDAEFGDRLLGSEKEQREHQFVLDFITQRLSELGLIPQYLPAPQLLKLSNIQHLWTPIQAQLFTNVHPLDIVAQLHPTPAVAGVPTQIAQEQIRRYETFDRSLYAAPLGWIDYQGNCEFIVGIRSALIDSNPSSLNHDNTYRARLYAGAGIVAGSDPDKELAEIQLKLQALLKALL

SEQ ID NO: 93675 - protein, 413 aa, Collimonas arenae
  REGION 1..413: note = tr|A0A0A1FDM5|A0A0A1FDM5_9BURK Isochorismate synthase of siderophore biosynthesis OS=Collimonas arenae; OX = 279058 GN=LT85_1804 PE=4 SV=1
MNDRLHHGFLKQASAADLLQHYQAGATFFASPRRSLLAHGVKVVMPPCEPGQIAANAAAWLKEAGREGLPPAVLMGVLPFRLDGSSASPYLYMPQQLASGAGVDSAVAALNPAGQTTGAQLSTPPLMQPTPEGYRDNVRSALAAIRDTRFAKTVLSRSLTLDAQIDIPALLQRLAARNLRGYTFAVDLAEAEKDGAHRTMIGASPELLLARYGRELVSHPLAGSIPRSADPVEDRRRADGLLQSVKDLHEHALVVDAVAAAMRPYCKNLKVPATPSLLATPTMWHLGTEVRGELADLATTSLEVALALHPTPAVCGHPAAPAAKFIADTEGFDRRYFAGLVGWCDSQGDGEWAVTLRCAEVGSGSATLYAGAGIVAGSEPQLELLETSAKLRTMLAAMNLELMLEDEQVKAAS

SEQ ID NO: 93676 - protein, 413 aa, unidentified
  source 1..413: note = Comamonadaceae bacterium
  REGION 1..413: note = tr|A0A3M6R8E3|A0A3M6R8E3_9BURK Isochorismate synthase OS=Comamonadaceae bacterium NML180581 OX=2478745; GN = EBQ24_00810 PE=4 SV=1
MPAALSADPSSAPGAPFAAASATEASATSATATLAAGEVFFTTPMQQQWRSHAHAQDIHCLAPATPHTVQTLFAQARTRGIGQAQLFAAIPFDVRQPASFSIPARLVQTSGPLPQQAAQTPDPALHTTPLPSPERYAELVRQALALLERGELHKIVLARALDVQAGGPLSPGAIVQRLAARNPHAFLFHIPLCNAAGAPHGSMLGASPELLVRRSGRQLTLHPLAGSIPRHADAAEDERRRQGLAASEKDLREHRYVTQDIARHLAPLCCEVDVPERPSVIGTDALWHLGTTITATLRDGATTALDVALALHPTPALCGSPTAQALAHIQALEPFARDYFAGLVGWQRENGDGEWAITIRCAQFDGQRRLRLYAGAGIVSGSDPEREVQETAAKLSTFLQSLQPQAIASQSQS

SEQ ID NO: 93677 - protein, 430 aa, unidentified
  source 1..430: note = Conservatibacter flavescens
  REGION 1..430: note = tr|A0A2M8S473|A0A2M8S473_9PAST Isochorismate synthase MenF OS=Conservatibacter flavescens OX=28161; GN = menF PE=3 SV=1
MDNLQSLKRQVEQCLLTHQPNPQETISMYQFHVDFYGHLLSWLKAQSTYPQFYFNLRDSAEKLCAIGKVRSFSEVFSANQFVQQSGFTLIGGLTFDGASCFYLPRLLFQQQQNRLTLSVFIDNQVAFSEEKAAIAPLLDNLARYMAFDDIHSNRLQLIDQAHNQAAWCNMVQSALQALQHTELNKVVLANASDFQCIPALNAKDFLRESELVNTHCYHFLFAQDAERCFVGSSPECLYQRQDNHLITEALAGTAFVHHDTQQNQQQADWLLHDSKNQYENWLVVEGICQNLKHYAQNIDVSPLSIKQLRQVQHLYRQIFVELAPHIGDDRCLQAIHPTAAISGLPQQIAIDFIQKTEKFDRTWYAGTLGFISPQRAEFCVTIRSAIIEHNKIRVFAGAGIVEGSDPLLEWQEIERKAMGLISLLQSTTTQ

SEQ ID NO: 93678 - protein, 442 aa, unidentified
  source 1..442: note = Corallincola sp.
  REGION 1..442: note = tr|A0A368NIJ8|A0A368NIJ8_9GAMM Isochorismate synthase MenF OS=Corallincola sp. C4 OX=2282215 GN=menF; PE = 3 SV=1
MAVRQLPIPAKSDPSIPLLTQLSNLGPFRGPLQLVQTLDRVSGIPWLQAQSQYPKAYWQSRESDKELAASGCVRKFATANEASHCLSESAALPLVIMGALPFDDTNTPGTEQPLFFLPRLLWQRQDDNITLTLNLWVDEAHSFTDEMAAAKDALHTLRQPAHTPCPPLPDVLAVCNSPEQASWAKLVSQALAEQPILSKVVLARRQLLTTGQPCDPWLLLQRWHQANQHSTPFALQLDNQSSFIGCTPERLFKRDGRQLLSEAVAGTDVRPKDPLHARLIAMALLGDGKNRRENRIVLDDILSRLGPICDALSYDDRAQVLKLNRLQHLKRAIHGRLRKEICDADLLARLHPTPAVGGTPRADALRFIAAHEPFQRGWYAGAIGYLSHANSEFSVAIRSAHIEGCQLALYSGAGIVDGSDAHKEWQELDNKVATVRSLMGQK

SEQ ID NO: 93679 - protein, 436 aa, Corallococcus sp.
  REGION 1..436: note = tr|A0A3A8L9Q7|A0A3A8L9Q7_9DELT Isochorismate synthase OS=Corallococcus sp. CA053C OX=2316732; GN = D7V97_11670 PE=4 SV=1
MTPLSPAEGPHWVAGMMPLAGVDPLAGAGSLGIPSVYWERPVDREAAAGWGEAGVREAHVASELPAVLGSLGHEAVRWLGPVPVRMPGPWFGGMRFSPTGQVDGAWRSHGLARWTLPEVLVWREDNALYVAAFATDAQGGEDAVRSRLERVRASFSQTYRHAVGAPVALRTTSSRHDFEALVDRAVEAITTGHLHKVVLARAMDAEGPAPFDIVDVLARLREQNPRCATFLFRAPDGTGFLGATPETLCRVDGRVLETEALAGTAAPGGEAALDASDKDRREHEAVVRYILQALKPVAASVSADAQPSVLALKNVMHLRTGIRAKLGEGVDTAQVVTALHPTPAVGGTPRERALSFLVEHEALDRGWYAGPVGWVGPGRAHLVVALRSALVRGSHARLFVGAGIVAGSSAESEWRETEMKSLAMLRALGGGDVVRR

SEQ ID NO: 93680 - protein, 421 aa, unidentified
  source 1..421: note = Coriobacteriaceae bacterium
  REGION 1..421: note = tr|A0A143X9M2|A0A143X9M2_9ACTN Salicylate biosynthesis isochorismate synthase OS=Coriobacteriaceae bacterium CHKCI002 OX=1780377 GN=pchA PE=4 SV=1
MTKIFSHTRPIDADIVDAFCTLQKGFTDQFVYYRKDRPVRFMGLGRCIALPTLDDAECELEGPEAHQPVFFSFNRFDAGNPAPADELFEAFPRLRFMLPEIVLIEGECGPLLQVNSLGPVYPGRIERFVRQAAGAPPRRRESIPYRLEPDSREAWREAVAAALGAIGEGRVEKVVLSRRQRLVAARPFSSKDLLVNLIDGSARGTVLLYRYADVFFCGCTPELLVRKRGDAVESMCLAGTCPAGGSEKERARLADALMADAKNRAEHDYVARFIREVFHRTCYDVDVPDRPGILSLTHVQHLHTPARARMLDGMDLWSMMGDLHPTPAVAGTPVGEARMLLRRIEAYNRGFFAGACGYVDGAGDGEFSVALRTGVFDGEVGWVYAGCGIVEGSVADDEYDEIDLKLRTILSAFDGETHGGA

SEQ ID NO: 93681 - protein, 430 aa, unidentified
  source 1..430: note = Corticibacter populi
  REGION 1..430: note = tr|A0A3M6QY51|A0A3M6QY51_9BURK Isochorismate synthase OS=Corticibacter populi OX=1550736 GN=D8I35_01610; PE = 4 SV=1
MSLPNIEPHMRATPGALPRTTLQREDAPLAARRSPDLSNCFMLHGAAQSLAATGVHKPLFQDSTHALTGCCDTVLGALDPDWAAAPLLVGAMPFDRDAPCWLYQPQTMHTIDSLLAPKAAGCAPAGGDSAQVQAVPDRRSYQDMVRQATARLGNGTAEALRKVVLARSLEISRTTPFDLRRLLRHLMNDASITTYCLPLPGPARHAAASHLVGATPELLITRRGKNIKSLPLAGSLPKQANPMLDQAATRRLLQSAKDLQEHRVVVEFIADLLNPLCANLAVPAHPSLCSTASMWHLGTHINGTLKHPDDLATSSSLALAARLQPTPALCGAPRDAALTLIRQLEPFERGFYGGTAGWSDNTGDGSWYVAIRCAEIQGPRARLFAGAGIMHDSSPAAEADETAAKFSAMLRALELEGLELFPTLGNTASR

SEQ ID NO: 93682 - protein, 367 aa, Corynebacterium accolens
  REGION 1..367: note = tr|E0MXF4|E0MXF4_9CORY Isochorismate synthase; OS = Corynebacterium accolens ATCC 49726 OX=862512 GN=entC; PE = 4 SV=1
MHEDRPSTAPDFLLSRATGSVRTQGARATFTSAEAAVDALRRGDAEMVVGAIPFDSDTPAALTVPESIIREDGPLEPHAFYRNQSLNSRVVGFDPEPEEHLRRVEAAIGTIETSKLEKVVLARAVDIEFAAPIDPRLVAARLIDLSVNRDGFIADLSPAGRPGAMLVGSSPEVLIKRQGSTVSAFPLAGSTPRRANKAADHIASQDLLHSAKDLLEHSFVVEHLRRILEPLCSSLDIPETPQLIHTNEMWHLGTPVTGTLRDKDLTALELAEVVHPTPAICGTPTEAAQALIETAETDRGFYAGTVGWCDSSGDGEYMVAIRCAEVAGDGLSARAWAGGGVVGASNAQAELEETTAKLQTILRALSL

SEQ ID NO: 93683 - protein, 369 aa, Corynebacterium ammoniagenes
  REGION 1..369: note = tr|D5NZR8|D5NZR8_CORAM Isochorismate synthase; OS = Corynebacterium ammoniagenes DSM 20306 OX=649754; GN = HMPREF0281_02105 PE=4 SV=1
MCAQRPITAPDFLLSRATGSVRTQGSVNTYTDVDKAIDDIEAQRVEMVVGALPFDLDKPAALTVPKTIVREPAALEPPAYFRMQNLSSEVSGVDPDPHEHLRRVEAAVGTINASRLEKVVLARAVDIEFNGPVDPLLVAARLIDLSNHRDGFAADLTPAGYDGAMLVGASPEVLVKKKGNVVSAYPLAGSAARSADPEEDRLAGERLLASDKDLREHAFVVDHLAEILAPMCDTFYAPNTPQLVKTNEMWHLGTPISGTLKKPTTALELAVRCHPTPAICGTPTAAAKSLICTAETDRGFYSGAVGWCDASGDGEYMVAIRCAEVAGDGLTARAWAGGGIVEDSDPEEELAETTAKLQTIVRAMGIQNL

SEQ ID NO: 93684 - protein, 410 aa, Corynebacterium amycolatum
  REGION 1..410: note = tr|E2MTE8|E2MTE8_CORAY Isochorismate synthase; OS = Corynebacterium amycolatum SK46 OX=553204; GN = CORAM0001_0711 PE=4 SV=1
MSMENHPSLGGGNEEEKQENSHSSNEPAATPKHSTRWDTSRPTTAPDFLLSRAHGSIRTQGIEEQLSDPWLAAEGLHSGIHKMVVGALPFDLDKPAALTVPREVIRSSQPLEPPAHYRWNAPKPHANIVAYDPPLDEHAERIAAAIRTIEYSALEKVVLARAVELEIDPPIDPLLLASRLIDGSPNRDGFVVDLSPAGSDYEGKLLIGSSPEMLVRRTGDIVEAFPLAGSLPRSRNEEVDRATARRLADSRKNLDEHAFVVDDIADNLAPLCSSLDVPDSPELMSTAEMWHLATHIRGRLKDPSLSVLDLALVVHPTPAICGTPTESAFGVIQAVETDRGFYSGAVGWCDENGDGEFVVSIRCAEIDTEGSVARLWAGGGIVSHSDPEEEVTETSAKMGTVLRAFGVKGA

SEQ ID NO: 93685 - protein, 367 aa, Corynebacterium aurimucosum
  REGION 1..367: note = tr|C3PFX9|C3PFX9_CORA7 Isochorismate synthase; OS = Corynebacterium aurimucosum (strain ATCC 700975 / DSM 44827 / CN-1) OX=548476 GN=menF PE=4 SV=1
MCENRPSTAPDFLLSRATGSVRTQGSVATFSDVNAAVSALRSGTAPMVVGALPFHKGDPAALTVPRSIIREEGPLEPHAYYRSGTLNARVTGFDPEPEEHLRRIEAAIATIEASKLDKVVLARAVDIEFNAPVDPLLVAARLIDLSSHRDGFIADLTPAGRPGAMFVGSSPEVLIKKQGSTVTAFPLAGSAPRQADKARDIKAGQDLHNSAKDLREHAFVVDHIRRILQPLCETLDAPTAPQLTSTNEMWHLGTPIAGTLKDSDITALELAELVYPTPAICGTPTEAAQALIETAETDRGFYAGAVGWCDDSGDGEYMVAIRCAEVAGDGLSARAWAGGGIVVDSDPTAELQETTAKLRTILRALNL

SEQ ID NO: 93686 - protein, 367 aa, Corynebacterium camporealensis
  REGION 1..367: note = tr|A0A0F6QY41|A0A0F6QY41_9CORY Isochorismate synthase OS=Corynebacterium camporealensis OX=161896; GN = menF PE=4 SV=1
MHETRPSTAPDFLLSRANGSVRTQGALRTFDNADAAIDALRGGEAEMVVGAIPFDADTPAALTVPRSIIREDGPLEPPAYYRNGTLNARITGFDPEPEEHLRRIEAAIATIDNSKLSKVVLARAVDIEFFAPVDPRLVAARLIDLSANRDGFIADLSPAGRPGSMLVGSSPEVLVKRQGSTVSAFPLAGSAPRQANAAHDQIAGQDLLHSTKDMQEHAFVVDHLRQALEPLCERLDVPERPQLVSTNEMWHLGTPIVGTLKDSDLTALELALAVHPTPAICGTPTDAARALIETAETDRGFYSGAVGWCDATGDGEYMVAIRCAEVSGDGLSARAWAGGGIVIDSDPSAELAETTAKLRTMLRALNL

SEQ ID NO: 93687 - protein, 367 aa, Corynebacterium canis
  REGION 1..367: note = tr|A0A5C5UTR6|A0A5C5UTR6_9CORY Isochorismate synthase OS=Corynebacterium canis OX=679663 GN=FRX94_01730; PE = 4 SV=1
MCSRPSTAPDFLLSRAHGSVRTQGSLTTYTDPWEAAEALRRGAHTMIVGAIPFDLEQKAALHVPAHIVRTKGPLEPPAHYRLERRIDAELLCDDPVRTEHQERVRAAVETIRRTRLDKVVLARAVDISFLEPVDPLLIAARLIDYSPDRNGFFTDLSPAGGRFLGRWLVGSSPEVLIRRVGDRVSTYPLAGSAPRSGIREDDRRTAKHLQDSAKDLAEHKFVVDHIAAALRPLCTELSVPKTPEITSTAEMWHLATPISGTLKDPRTTALDVALRVHPTPAICGTPTPLAKDLILQVETDRGFYSGAVGWCDAEGNGEFMVAIRCAETDGMHARAWAGGGLVNHSNPESELRETDAKLRTMMRALGL

SEQ ID NO: 93688 - protein, 385 aa, Corynebacterium casei
  REGION 1..385: note = tr|G7I0P2|G7I0P2_9CORY Isochorismate synthase; OS = Corynebacterium casei UCMA 3821 OX=1110505 GN=dhbC PE=4; SV = 1
MQANDNNCSDHPIFDFITPEYRLTGHGRRVKLSPTGWNGEEVAAAIETALKGVPFGLPVVGCIPFDTQKAAELYVPEEVTWGKGLEKETPASVAQTTIRTDDGDVPTPNSAQYRASVAKAVRSIENGELEKIVLARTATIKTPSAIEPCVIVKDLAKHNPNSFVYRSDISSGTLVGATPELVLRSWAGTITSFPLAGSIPVGGADELAREKLKETLLSSPKDRAEHGLVVHQVGETFKQYLDDAHIPSSPEIVETPVILHLGTRISGHLESELSSRVSTVMRLLYDLHPTPAVCGWPTSVARRKIQELEDFDRGMYSGLIGWIDAQGNGEWALALRGGVINGESATLYAGAGIVAGSDPEHEHAETAAKFQTIARVIERQRTLHL

SEQ ID NO: 93689 - protein, 427 aa, unidentified
  source 1..427: note = Corynebacterium choanis
  REGION 1..427: note = tr|A0A3G6J5R6|A0A3G6J5R6_9CORY Isochorismate synthase DhbC OS=Corynebacterium choanis OX=1862358; GN = dhbC PE=4 SV=1
MKESAWDGRTGGRTDAALRVLGAVVGYSSSTTSPAMCDCQVVITLTTTMTDSRPASAPDFLLSRASGSLRTQGSASTFSDVDEAMWALAHAKVDLVVGALPFRFDDPAALTVPKHAIFSAGPLEPHAYYRTGEGSKLSAQVLREVPSVAVHEERVAALIRTIANTAVEKVVLARAIDIAFDPPVDPLTVAAKLIDLSASLDGFAVDLTPAGERFAGSMLVGSSPEVLLKKQGATVTAFPLAGSLPRGRTPEEDAANKEALHNSAKDIAEHRFVVDALVDTLGPLCEQIDYPQRPEITATAEMWHLATPITATLRSADITALDLAVRCHPTPAVCGTPQALAYDLINTIEQPRNFYGGAVGWSDKDGNGEFMVAIRCAEVAADGNSARAWAGGGIVAESHAADEVQETSAKLRTIARALQIDVGPTTS

SEQ ID NO: 93690 - protein, 376 aa, Corynebacterium deserti
  REGION 1..376: note = tr|A0A0M4CWW5|A0A0M4CWW5_9CORY Putative isochorismate synthase OS=Corynebacterium deserti GIMN1.010 OX=931089 GN=menF PE=4 SV=1
MSAHRDPAAPSTAPDFLLSRGHGSVRTQGARETFTDAWAAIDALKSGRVPMVVGALPFERDKPAALTVPEVIIREDGPLEPHAYYRFGPGSQLHAEVAGLDPSPIEHLRRVNAAINTITNTVLEKVVLARAVDISFDPPVDPLLVAARLIDNSHNKDGFIADLSPAGPSFEGHMLVGSSPEVLIKRQGSTVSAYPLAGSAPRLSDPSRDSAQGRTLLASAKNLSEHSYVVNHLRTVLSPLCSTLDISDVPELTKTNEMWHLATPIVGTLKDSGISALELATLTHPTPAVCGTPTDAAEALIASAESPRNFYAGAVGWCDSTGDGEYMVAIRCAEVSGDGTWARAWAGGGIVESSDAQEEFDETTAKLQTIMRSLGL

SEQ ID NO: 93691 - protein, 377 aa, Corynebacterium diphtheriae
  REGION 1..377: note = tr|A0A3S7LTD4|A0A3S7LTD4_CORDP Isochorismate synthase OS=Corynebacterium diphtheriae OX=1717 GN=menF; PE = 4 SV=1
MCAHRPSTAPDFLLSRSHGSIRTQGAVETFSDPRKAVEALRSGRVELVVGALAFRRDHACALTVPRSVIREEGPLEPHAYYRQGPGSIVNAQVEKLVPSLDEHHARVEAAINTIKSTSLKKVVLARAVDMTFSPAVDPRLIAARLIDLSRNRDGFIADLTPAGEDFAGAMLVGSSPEVLIKKQGSTVTAYPLAGSAPRSADAVTDATNAELLRRSHKDLQEHSYVVEHLRNVLEPLCSKLSIPANPELTKTNEMWHLATPVVGTLKDASLTALELAMRTHPTPAICGTPTDAAEELISIAEGDRRFYAGTVGWADNHGDGEFMVSIRCAEVSSDGTSARAWAGGGIVAESDAAAEVEETTAKLRTIMKALGITSFDA

SEQ ID NO: 93692 - protein, 367 aa, unidentified
  source 1..367: note = Corynebacterium endometrii
  REGION 1..367: note = tr|A0A4P7QFK1|A0A4P7QFK1_9CORY Isochorismate synthase DhbC OS=Corynebacterium endometrii OX=2488819; GN = dhbC PE=4 SV=1
MDIPRPATAPDFLLSRATGSVRTKGSVTTFTDPWQAADYLRSGKAEMVVGALPFNLDEAAALTVPESIIREDGPLEPHAFYRRGTLVARVAGYDPEPEEHLSRVEAAIATIERSKLDKVVLARAVDITFPQPVDPRLVAARLIDNAVNRDGFIADLSPAGREGAMLVGSSPEVLIKKQGSTVTAFPLAGSAARHPDPERDEARGKALAHSAKDLAEHRYVVDHLRRVLNPVCSRLDAPRTPQVIQTREMWHLGTPIVGTLASSQTSALDLALAVHPTPAICGTPAEAAQAIILDCESDRGFYAGAVGWCDSAGDGEYMVAIRCAEVAGDGLSARTWAGGGVVAESNAHEELAETSAKLRTILRSLDL

SEQ ID NO: 93693 - protein, 367 aa, unidentified
  source 1..367: note = Corynebacterium epidermidicanis
  REGION 1..367: note = tr|A0A0G3GP82|A0A0G3GP82_9CORY Isochorismate synthase OS=Corynebacterium epidermidicanis OX=1050174; GN = menF PE=4 SV=1
MSNPRPSTAPDFLLSRTHGSVRTQGSIRTFTDPWDAVAALKNGEAEMVVGALPFLRGAPAALTVPEKIVREDGPLEPHSYYRIGPGSELTAAITGFDPDPAEHEERVAAAVATLKNTALEKVVLARAVDISFTTPVDPRLVAARLIDNSHNFDGFIADLGPVGRGFLVGSSPEVLIKLQGSTVTAYPLAGSAPRSADPVADHVAGADLQASTKDLAEHRFVVEHLLRLLEPVCSSLSAPTVPELTKTDEMWHLATPIVGTLAREMTALELALLVHPTPAICGTPVDAAEALIESVETPRGFYAGAVGWCDASGDGEYMVAIRCAEVEPDGLTARAWAGGGIVASSSPSAELAETDAKLRTILRALGL

SEQ ID NO: 93694 - protein, 380 aa, Corynebacterium falsenii
  REGION 1..380: note = tr|A0A418Q743|A0A418Q743_9CORY Isochorismate synthase OS=Corynebacterium falsenii OX=108486; GN = D3M95_06085 PE=4 SV=1
MTHEQRPVTAPDFLLSRPDRSIRTQGRVTTYPDPFEASTALRSQEAELIVGAIPFDTSHRAALMVPEKVVRTEGPLEPPAYFRGTKAAESLQVEAVEAVTTLAEHRATVAAAVSTIQQTRLDKVVLARAVDVEFADEVDPLLIAARLIDLSAHRDGFAVDLSATGREEHAHSMFVGSSPEMLIRKKGREVSAFPLAGSAARTGNLERDQATGRSLLSSMKDQVEHQFVVDHYRRTLEPLCSKLSIPPYPEIHETNEMIHLGTRVEGTLKDDGFSALDLALMLHPTPAIGGTPTDDAIGIIEQVEQPREFYAGAVGWCDADGDGEFMVAIRCCVVEGASARAWAGGGIVADSSPEDEAAETTAKLQTVLRALNVPAAMRNV

SEQ ID NO: 93695 - protein, 383 aa, unidentified
  source 1..383: note = Corynebacterium genitalium
  REGION 1..383: note = tr|D7WD77|D7WD77_9CORY Isochorismate synthase; OS = Corynebacterium genitalium ATCC 33030 OX=585529; GN = HMPREF0291_11765 PE=4 SV=1
MRCLPGTLKSLLMPSPRPETAPDFLLSRASGSVRTQGTTSTFIEPWDAVAALQRREVNMVVGALPFDRDAPAALTVPEQIITEAGTLQPHSYYREGPGAQLHAAVAGYDPEPHEHLRRVEAAVDTICNSILDKVVLARSVDFVFDPPVDPRLVAARLIELSSTRDGFIADLTPAGKPGHMIVGSSPELLIRKQGLEITSYPLAGSAPRIFDDEDADRAAGEKLYNSTKDLDEHSYVVEHIRDILTPLCRELTIPDRPVLDRTNEMWHLATPIKGVLYDPAPSALDLATRLYPTPAVCGSPQYAAEALITTAETDRSFYAGTVGWCDSHGDGEYMVSIRCAEVNGDGTAARAWAGGGLVAASKPEEELAETTAKLLTIQRALGL

SEQ ID NO: 93696 - protein, 404 aa, unidentified
  source 1..404: note = Corynebacterium geronticis
  REGION 1..404: note = tr|A0A3G6J7V4|A0A3G6J7V4_9CORY Isochorismate synthase DhbC OS=Corynebacterium geronticis OX=2079234; GN = dhbC2 PE=4 SV=1
MSSCASIESSAPSAVFCDEHSTLITRGISQKFSSVEAAIQALKTGQETLVVGALPFHQGDAVSLFSPDSQRRSGPLPASSIESASLPPTDSRRSSVADVSFDFTPNQHRDRIAATVEKILSGQMQKVVLSRGIELRLCESELAQRVSDPWWMVRRFLQSNPNGQGHMVTLEPAGEPYCGAFFVGSNPELLIARKGRHIEALPLAGTVPRCKDPVQDQARATELQLSAKNLHEHAFVTADIAETLSNYCTSLEVPASPCVTATSHTWHLGTPIRGTLRGEPASALELAAMLHPTPAVSGFPQKSACEFLTNEEPHRGFYAGAVGWTDARGDGAWRVAIRGATVFTQKGEDASVRIHARSGGGIVAASLPDDEVQETTAKLGPVFRALGLDLEQLQISENRKDVFA

SEQ ID NO: 93697 - protein, 379 aa, Corynebacterium glaucum
  REGION 1..379: note = tr|A0A1Q2HW80|A0A1Q2HW80_9CORY Isochorismate synthase DhbC OS=Corynebacterium glaucum OX=187491 GN=dhbC; PE = 4 SV=1
MPSSRLPSRPSSAPDFLLSRTSGSVRTQGVERTFTDVREASAALTRGEVEMVVGALPFNKAEPAALTVPASIIREPGILNPHPYYREGPGAVLHARVAGFDPSPDEHLRRVALAVDEIRRTALEKVVLARAVDIAFDPPVDPRLVAARLIDLAASGDGFIADLSPAGRDGHFLVGSSPEVLVKRQGVRVSSYPLAGSAARKIDDPVADAAAGERLASSAKDLEEHRFVVEHIRDILAPFCTELTVPARPILEKTNEMWHLATPIAGILRESPTTPAPSALELAEMLYPTPAVCGTPQDAAAKMILQTESDRGFYAGAVGYTDASGDGEYMVAIRCAEVNGAGNQARAWAGGGLVASSDPQSELDETTAKLRTISRALSL

SEQ ID NO: 93698 - protein, 350 aa, Corynebacterium glucuronolyticum
  REGION 1..350: note = tr|C2GFT5|C2GFT5_9CORY Isochorismate synthase; OS = Corynebacterium glucuronolyticum ATCC 51866 OX=548478; GN = dhbC PE=4 SV=1
MSRVHGSVRTQGRAAFYTSVDEAIAALPTAGLIVGALPFDPSAPAALTVPKSVIWEETSLHPHPYYLTGEGSTLKAHIAGFDPSPEEHLARVTAAVEALKRGNLDKVVLARAVDIAFDEPVDPRLVAARLIATSSSHDGFIVDLGGSWLVGCSPEVLVRKQGAEVTCYPLAGTAPRSADPVEDQAAANRLLASAKDLAEHRFVVDDIRASLEPLTSSLTIPDTPELTSTNEVWHLATPIRGKLSDPTLTALDLARAVHPTPAICGTPEEAARQMILDVESDRHFYAGTVGWADAKGNGEFMVAIRCAEVSEDGTRGRAWAGGGIVAQSDPQQELEETTAKLGTILRALGL

SEQ ID NO: 93699 - protein, 376 aa, Corynebacterium glutamicum
  REGION 1..376: note = tr|A0A1R4FZS5|A0A1R4FZS5_CORGT Isochorismate synthase OS=Corynebacterium glutamicum OX=1718; GN = FM102_08460 PE=4 SV=1
MSAHRNPSAPNTAPDFLLSRGHGSVRTQGSKEVFTDPWEAVDALKQGRVAMVVGALPFERDKPAALTVPEHIIREDGPLEPHAYYRFGPGSVLHASVAGIDPSPIEHLRRVNAAINTINNTVLNKVVLARAVDISFEPPVDPLLVAARLIDNSHNKDGFIADLTPAGPDFDGHMLVGSSPEVLIKRQGSTITAYPLAGSAPRLTDPVRDEAQGQNLLASAKNLEEHSYVVNHLRTILEPLCSQFDAPTVPELTKTNEMWHLATPIVGTLKYPHITALELAIRTHPTPAICGTPTDAAEALIIEAESPRNFYAGAVGWCDSTGDGEYMVAIRCAEVSEDGTWARAWAGGGIVAESDAQEEFDETTAKLQTIMRSLGL

SEQ ID NO: 93700 - protein, 408 aa, unidentified
  source 1..408: note = Corynebacterium glyciniphilum
  REGION 1..408: note = tr|X5EB67|X5EB67_9CORY Isochorismate synthase; OS = Corynebacterium glyciniphilum AJ 3170 OX=1404245; GN = CGLY_07080 PE=4 SV=1
MAERVGARARTCGTSNFSLFRPPEYGGCVINNDRPSTAPDFLLSRASGSIRTQGTRTSFPDPFEAATALRDGSARLVVGAVPFDTGNRAALTVPGTVIETEGPLEPPAHYRGRELGDRLEVVNVHPLSSSEEHQSTVAAAIETMHNTTLRKVVLARAVDIEFAEEVDPLLIAARLIDLSAHRDGFAVDLSATGRSDDRGTMLVGSSPEVLIRRRGTTVEARPLAGSAARLADRQADETVGRMLRDSTKDLTEHELVVDHYRQVLSGVCSELSIPDAPELIKTNEMWHLATPVRGTLPDLNFSALDLALMLHPTPAVGGTPTDDAIGIINEVEEPRCFYAGFVGWCNDDGDGEYMVSIRCAEVAGATARAWAGGGVIASSSPAAEAAETTAKLQTALRALNVPATMRAV

SEQ ID NO: 93701 - protein, 377 aa, unidentified
  source 1..377: note = Corynebacterium godavarianum
  REGION 1..377: note = tr|A0A556QFI7|A0A556QFI7_9CORY Isochorismate synthase OS=Corynebacterium godavarianum OX=2054421; GN = FPH17_02935 PE=4 SV=1
MPHTPASDSLRPASAPDFLLSRPGGSVRTQGAARRFSDAWDAIDALEAGDVDMLVGALPFDQDCPAALTVPEKIVRESGTLEPHPYYRVGPGAQLSASVTSFDPSPQEHLRRIEAAIGTIESSKLNKVVLARAVDIAFDPPVDPRLVAARLIDLSYTRDGFIADLTPSGRTGHFLVGSSPEVLVKRRGSEVSSRPLAGSAARIPHDRDADEAAAAALYNSAKDLGEHAYVVEHIRRVLAPLCSRLDIPDRPELEKTSEMWHLATPIRGVLKAPAPSALDLALRLYPTPAVCGTPSDAAEALITTAETDRGFYGGAVGYTDANGDGEYMVAIRCAEVDAAGATARTWAGGGLVVDSDPQAELDETSAKLRTIMRALGL

SEQ ID NO: 93702 - protein, 377 aa, unidentified
  source 1..377: note = Corynebacterium gottingense
  REGION 1..377: note = tr|A0A3M0U9U5|A0A3M0U9U5_9CORY Isochorismate synthase OS=Corynebacterium gottingense OX=2041036; GN = EAW56_05845 PE=4 SV=1
MPHTPASDSLRPASAPDFLLSRPGGSVRTQGAARRFSDAWDAIDALEAGDVDMLVGALPFDQDCPAALTAPEKIVRESGTLEPHPYYRVGPGAQLSASVTSFDPSPQEHLRRIEAAIGTIESSKLNKVVLARAVDIAFDPPVDPRLVAARLIDLSYTRDGFIADLTPSGRTGHFFVGSSPEVLVKRRGSEVSSRPLAGSAARIPHDRDADEAAAAALYNSAKDLGEHAYVVEHIRRVLAPLCSRLDIPDRPELEKTSEMWHLATPIRGEIKDPAPSALDLALRLYPTPAVCGTPSDAAEALITTAETDRGFYGGAVGYTDASGDGEYMVAIRCAEVDAAGATARTWAGGGLVIDSDPQAELDETSAKLRTIMRALGL

SEQ ID NO: 93703 - protein, 382 aa, Corynebacterium imitans
  REGION 1..382: note = tr|A0A239ZBX1|A0A239ZBX1_9CORY Isochorismate synthase OS=Corynebacterium imitans OX=156978 GN=dhbC PE=4; SV = 1
MPQTPAHNSPTPDHRRPASAPDFLLSRAHGSVRTQGSVRQFSDAFAAIDAIEAGEVDMVVGALPFDQNCPAALTVPETIVRESGTLEPHPYYRVGPGSRLSASVTSYDPAPQEHLRRIEAALGTIEASKLDKVVLARAVDIAFDPPVDPRLVAARLIDLSFTRDGFIADLTPAGRPGNFFVGSSPEVLVKRRGMEVASHPLAGSAARIPHDREADEAAAKALYNSAKDLDEHAYVVEHIRGILAPLCTRLEIPERPQIEKTSEMWHLATPIRGELKDPAPTALDLALRLYPTPAVCGTPPEAAEALITTAETDRGFYAGAVGYTENNGDGEYMVAIRCAEVDASGTSARTWAGGGLVLGSDPQAELDETSAKLRTIMRALGL

SEQ ID NO: 93704 - protein, 383 aa, Corynebacterium jeikeium
  REGION 1..383: note = tr|A0A381KE20|A0A381KE20_CORJE Isochorismate synthase OS=Corynebacterium jeikeium OX=38289 GN=menF PE=4; SV = 1
MAPMTHEQRPATAPDFLLSRPDRSIRTQGRKATFPDPFEASTALRNKEADLIVGAFPFDTSLRAALMEPETVVRAEGPLEPPAFFRGKDAARSLTVESVEAQTTAEEHTAMVAAAVATIQQSRLEKVVLARAVDITYAETVDPLLIAARLIDLSAYRDGFAVDLSATGRSEYQGAMFVGSSPEMLIRRDGRHISAFPLAGSAPRTGTLSIDDATARELGSSDKDLREHRFVVEHYRRVLEPLCETLDIPATPEIHETNEMIHLGTQIAGTLKDDEYSALDLALMLHPTPAIGGTPTDDALGVIAQEKSPREFYSGAVGWCDSSGDGEFMLSIRCAIVEDNTARAWAGGGIVVDSIPAMEAEETSAKLQTALRALNVPAALREV

SEQ ID NO: 93705 - protein, 354 aa, Corynebacterium kutscheri
  REGION 1..354: note = tr|A0A0F6QZB1|A0A0F6QZB1_9CORY Isochorismate synthase OS=Corynebacterium kutscheri OX=35755 GN=menF; PE = 4 SV=1
MRTQGAQQHLDNIDDAVDLLRAKKVDMVVGALAFRRDHKAALTVPVSIIREDGPLEPHAYYRHGSGAILRAQLAKLIPDIEEHHIRVQAAIDTISRSELKKVVLARAIDIDFSPPVDPRLVAARLIDLSFTKDGFIADLSPAGEDFLGHTLVGSSPEVLIKKQGSTISAYPLAGSAARSMIPREDKLRGEELRRSSKDLVEHQFVVEHLRRLLIPLCSTLTIPDYPELTCTNEMWHLATPVVGTLKDPHYTALELARLIHPTPAICGTPTDAAEELIALAEGDRRFYAGAVGWCDNTGDGEYMVAIRCAEINAEGTHARAWAGGGIVAESDAHAEVAETSAKLRTIAKALGLKI

SEQ ID NO: 93706 - protein, 373 aa, Corynebacterium lipophiloflavum
  REGION 1..373: note = tr|C0XPL6|C0XPL6_CORLD Isochorismate synthase; OS = Corynebacterium lipophiloflavum (strain DSM 44291 / CCUG 37336) OX=525263 GN=dhbC PE=4 SV=1
MQSARPATAPDFLLSRSHGSVRTQGCAGAFTDIDEAIDAIDRGAVEMIVGALPFDQDAEAALTVPDTIVCEPGTLEPHPFYRVGQGSKLSARVCGFDPSPVEHLRRIEAAVATIQNSALDKVVLARAVDIAFDSPVDPRLVAARLIDLSYTRDGFIADLTPAGFHGHMLVGSSPEVLVRRRGNRVSSYPLAGSAPRVLDDASADRAAAKNLFESTKDLVEHAFVVDHIRSVLGPLCSSLTVPERPIVDKTNEMWHLATPITGVLKDPAPSALDLAERLYPTPAVCGTPTEAAKALICTAETDRSFYAGAVGYTEANGDGEYMVAIRCAEVSGDGTTARAWAGGGLVADSDPQAELDETTAKLRTIMRALGLSL

SEQ ID NO: 93707 - protein, 385 aa, unidentified
  source 1..385: note = Corynebacterium lowii
  REGION 1..385: note = tr|A0A0Q0UAK1|A0A0Q0UAK1_9CORY Isochorismate synthase DhbC OS=Corynebacterium lowii OX=1544413 GN=dhbC; PE = 4 SV=1
MPKTPASNRAVSRNDLFFWQGRGTRYAPAQALSAVPAARSENPWRPGTIVAGALPFDVASAAAPALWELPAWEEAEPLLLDAAAPARLRNLRPASAPGNYISAVRRAVEELSAAETPMEKVVLAREVRAELAEEPAWPDLLASLVERNPTATTFSVPLPGGASGAGLSEGDPADVFFGATPELLLRKEGATVLSHPLAGSIPRSANPEEDRRRAEGLLLSAKDAHEHAFVTQMIGQALAPVCAELDVPAQPSLLATDTMWHLGTRISGRLKAEEQHRDALSLARLLHPTPAVAGWPTGAAMSAIRDLEHADRGLYAGAVGWVDANGDGQWSVSIRCGLLRGLELSAWGGAGIVAQSEAESELRETSAKLRTIVEGLGVQIEGAQA

SEQ ID NO: 93708 - protein, 367 aa, Corynebacterium macginleyi
  REGION 1..367: note = tr|A0A3M0GPW8|A0A3M0GPW8_9CORY Isochorismate synthase OS=Corynebacterium macginleyi OX=38290; GN = D9543_07100 PE=4 SV=1
MHEDRPSTAPDFLLSRATGSVRTQGARATFTSAEAAVDALRRGNTDMVVGAIPFDSDTPAALTVPESIIREDGPLEPHAFYRNQTLNSCIVGFDPEPEEHLRRVEAAIGTIETSKLEKVVLARAVDIEFSSPIDPRLVAARLIDLSVNRDGFIADLSPAGRPGAMLVGSSPEVLIKRQGSTVSAFPLAGSTPRRANKSADHIAGQDLLHSAKDLLEHSFVVEHLRRVLEPLCSSLDIPDTPQLLHTNEMWHLGTPVAGTLRYKNLTALELALAVHPTPAICGTPTEAARALIETAETDRGFYAGTIGWCDNSGDGEYMVAIRCAEVAGDGLSARAWAGGGVVGASNAQAELEETTAKLQTILRALSV

SEQ ID NO: 93709 - protein, 370 aa, Corynebacterium marinum
  REGION 1..370: note = tr|A0A0B6TL63|A0A0B6TL63_9CORY Putative isochorismate synthase OS=Corynebacterium marinum DSM 44953 OX=1224162 GN=menF PE=4 SV=1
MCAHRPVTAPDFLLSRAHGSVRTQGSLETFTDPWAAIEALRSGRVPIVVGALPFDRSAPAALTVPEHVIREDGPLEPHSYYRQGPGSVLHARIVGVDPEPEEHLRRVEAAVSTIRASKLEKVVLARAVDIAFSPAVDPLLVAARLIDNSYNCDGFIADLSPAGRPGDMIVGSSPEVLVKRQGSTVTAYPLAGSAPRQADPDADLDVGRRLADSAKDLDEHRYVVEHLREKLGPFCAHLSIPERPEVTRTNEMWHLATPIVGTLKDPAVTALELAVHTHPTPAICGTPTDAAEALIETAEADRGFYAGVVGWCDDSGDGEYMVAIRCAEVTGDGRFARAWAGGGIVADSDPAEELTETTAKLRTILRSLGL

SEQ ID NO: 93710 - protein, 419 aa, Corynebacterium mastitidis
  REGION 1..419: note = tr|A0A2N0X7G0|A0A2N0X7G0_9CORY Isochorismate synthase OS=Corynebacterium mastitidis OX=161890; GN = CXB45_06380 PE=4 SV=1
MWPARWTSLPPRQPATSPSRSSSWTGVPACMPETPREETTDALRDPLTRGDLLFCQPDRSRYLPAAALTPVPPSAAENPWRPGMVVAGAVPFDEAGPTPPALWTAPAWRAWRRGAQEEPAEAARPRLRGVYPTRAPWEYVRAVRRAVERLSAPDGAVEKVVLAREIRATLGEEPDWAALMGRLADRNPSATVFSVPVPGEADPGAVFFGASPELLLRKSGDAVLSHPLAGSVPRSADPEEDRSRANALLESAKDAREHAFVTRMIGQALAPVCAELSVPAAPSLLATDTMWHLGTRIEGRLAPEHAHRDALSLARLLHPTPAVAGWPTRAAMSAIRRLEHADRGLYAGAVGWVDGNGDGQWNVSIRCALLSGLEMSAWGGAGIVAESVAESELKETSAKLRTIVEGLGVDAEEAEHARW

SEQ ID NO: 93711 - protein, 352 aa, Corynebacterium matruchotii
  REGION 1..352: note = tr|C0E0B4|C0E0B4_9CORY Isochorismate synthase; OS = Corynebacterium matruchotii ATCC 33806 OX=566549; GN = CORMATOL_00414 PE=4 SV=1
MHSFIFTESGLTLTACGVAQEFDRISDANEYLHDGLSLIVGALPFHRADVPRLFAPREYKFSSEPVALESPDTLPAVASVDFLPPLSVHQQRIEQCIAEIQAGTLDKLVLSRAERFHFTGPVNPEAVLAGYMASAGTGFGYLVELADGGFFIGPSPEVLIKKQGREISSFPLAGTAMRSADPELDRAIAANLQASEKDLHEHSFVTAGIREALAPLCTQLEIPEIPLVMHTAHTWHLGTPIRGILRPDVDMSALDLAQLLHPTAAVNGHPAQIAAELLAKQEPDRGFYSGAVGWANGRGDGEWRVGIRSALISGDTVTAYAGGGIVADSVAADELRETHTKLGPIRSALGIL

SEQ ID NO: 93712 - protein, 367 aa, Corynebacterium minutissimum
  REGION 1..367: note = tr|A0A376CXM1|A0A376CXM1_9CORY Isochorismate synthase OS=Corynebacterium minutissimum OX=38301 GN=menF; PE = 4 SV=1
MCVHRPSTAPDFLLSRATGSVRTQGSVATFDEVDAAVSALRSGEAEMVVGALPFHKGEAAALTVPESIIREDGPLEPHAYYRSGALEARVTGFDPEPEEHLRRIEAAIATIEASKLDKVVLARAVDIEFLTPVDPLFVAARLIDLSSHRDGFIADLSPAGRPGAMLVGSSPEVLIKKQGSTVTAFPLAGSAPRHADRARDIVAGQDLHNSAKDLREHAFVVDHIRRILQPLCESLDAPSSPQLTSTNEMWHLGTPIAGTLNDPSITALELAELVYPTPAICGTPTEAAQALIETAETDRGFYAGAVGWCDSSGDGEYMVAIRCAEVAGDGLSARAWAGGGIVVDSDPEAELQETTAKLRTILRALNL

SEQ ID NO: 93713 - protein, 366 aa, Corynebacterium mustelae
  REGION 1..366: note = tr|A0A0G3GX68|A0A0G3GX68_9CORY Isochorismate synthase OS=Corynebacterium mustelae OX=571915 GN=menF; PE = 4 SV=1
MLTRPVTAPDFLLSRPHGSVRTQGSRQLFTNPWEAAAAIREKKCDFLVGALPFDIDDKCALRVPETIIRSDGPLEPPEYYRRGLPLNARLKMMMPSKTEHLNRVAAAVATIRNTALEKVVLARTVGVEFNTDDPIDPLEIAARLIHLSPERNAFLADISLDDAERRWIVGSSPEVLVKLSGNTVSCYPLAGSAARHPDPVKDEGLGQNLLRSEKDLWEHKLVVDHIVTALKPLCTSVNYSPTPELKKTAEMWHLATPITGTIATNTTALDVALRLHPTPAICGTPTEIARDLILQVETDRSFYAGAVGWCSSDGDGEYVVSIRCAETDGRFARAWAGGGLVASSIPDDEVAETDAKLRTIMRALGL

SEQ ID NO: 93714 - protein, 372 aa, unidentified
  source 1..372: note = Corynebacterium oculi
  REGION 1..372: note = tr|A0A0Q0YDX9|A0A0Q0YDX9_9CORY Isochorismate synthase DhbC OS=Corynebacterium oculi OX=1544416 GN=dhbC; PE = 4 SV=1
MSIPDYSFLFTGPAGTLSGVGRGATWHSVDQALGGLSDATPLVAGALPFHVTEPLALFSPVKFWFSPGAPALPEGEIPGVDSAVSEPDPEEHARRVQEATERIRSGEFEKIVLSRGVRYQLSAEIDARVLLARFLTGSGTGHGHLVDLHSAGTAYSGARLVGSSPELLLLKRGRYIESHPLAGTVARSADPVKDEALATELMLSAKNIEEHSYVTREIKRILEPWCSELEVPERPSLTATSHTWHLGTRIRGMVRENALSADGRLRGGAISALELAAALHPTPAVCGYPTAPTQSTLRAEEPQRGFYAGAVGWADDRGNGEWRVTIRGAVAQGSHVLAHAGGGIVADSDPQAEVQETQTKLGPVRAALGITE

SEQ ID NO: 93715 - protein, 393 aa, unidentified
  source 1..393: note = Corynebacterium otitidis
  REGION 1..393: note = tr|I7IX17|I7IX17_9CORY Isochorismate synthase; OS = Corynebacterium otitidis ATCC 51513 OX=883169 GN=menF; PE = 4 SV=1
MPTPRPSTAPDFLLSRSTGSVRTQGALKTFSSIGEAGRWLASNAPGRHSRPPAAGEPHEEPMIVGAIPFEIDKPAALTAPRSVIRSPGPLEPPAYYRAGASSPIEATITGLDPSKKRHLARVEAARRTIERTALDKVVLARAVTIAFARRVDPRALAARLIDASPTRDGFLADLSPAGGAYFGHTLVGSSPEVLIKKRGRTVTAFPLAGSAPRAADPADDRLAAGRLAASAKDLGEHRFVVEHLTSRLGPLCETLDVPDSPILTSTNELWHLATPIRGTLADEAYTALELVAAVHPTPAVCGTPTDAAMTVISGAETDRGFYGGAVGWADARGDGEFMVAIRCAEIDALGARARAWGGGGIVADSDPETELAETTTKLSTVLRCLGIDTDDVD

SEQ ID NO: 93716 - protein, 372 aa, unidentified
  source 1..372: note = Corynebacterium pelargi
  REGION 1..372: note = tr|A0A410W994|A0A410W994_9CORY Isochorismate synthase DhbC OS=Corynebacterium pelargi OX=1471400; GN = dhbC1 PE=4 SV=1
MCASSRPASAPDFLLSRAHGSIRTQGAKEQFNNIDDAIEALRRGEMVVGALAFRRDHACAFTVPENIIREDGPLEPHGYYRQGPGAQLHASLDALVPDEAEHAHRVAAAIETMRSTVLRKVVLARAVDVRFDPPVDPRLIAARLIDLSLHRDGFIVDLSPAGEDFVGNMLVGSSPEVLIKKQGSTVSAYPLAGSAPRAVDPIEDKKRGEALLRSTKDLDEHRFVVDHLRRKLSPLCSDLNIPDNPELTCTNEMWHLATPVVGTLKDAQMTALELAQIVHPTPAICGTPTDDAEELISFAEADRRFYAGAVGWAEGLDGEYMVAIRCAEVSGDGTRARAWAGGGIVEASDAQAEVAETSAKLRTIMKALGLSL

SEQ ID NO: 93717 - protein, 367 aa, unidentified
  source 1..367: note = Corynebacterium phoceense
  REGION 1..367: note = tr|A0A540R418|A0A540R418_9CORY Isochorismate synthase OS=Corynebacterium phoceense OX=1686286; GN = EJK80_12435 PE=4 SV=1
MFSSRPSTAPDFLLSRATGSVRTQGAQQTFDDLDAAVAALRSGDVEIIVGALPFERGARVALTVPESIIREDGPLEPHAHYRNRTLNARVTGFEPEPEEHLRRVEAAIATIQESKLDKVVLARAVDIEFSEPTDPRLVAARLIDMSYHRDGFIADLTPAGREGAMLVGSSPEVLIKRQGSTVSAFPLAGSAARQKDKARDILAGQDLARSPKDLREHAFVVDHLRRILSPLCETLDAPLTPQLMKTNEMWHLGTPVVGTLKDPHLTALELAALVHPTPAICGTPTDAAESVIQTAESDRGFYAGTVGWCDNSGDGEYMVAIRCAEVSGDGLTARAWAGGGIVSDSDANAELEETSAKLRTILRALGL

SEQ ID NO: 93718 - protein, 371 aa, Corynebacterium pilosum
  REGION 1..371: note = tr|A0A376CQ14|A0A376CQ14_9CORY Isochorismate synthase OS=Corynebacterium pilosum OX=35756 GN=dhbC PE=4; SV = 1
MCANRPSTAPDFLLSRAHGSVRTQGCQHAFTVTWDAIEALNKGEVEMVVGALPFDKDAPAALTVPVNIIRESGTLEPHPYYRVGEGSSLSASVYGFDPEPSEHLRRVEAAVETIRSSLLEKVVLARAVDIEFDPPVDPRLVAARLIDLSYTRDGFIADLTPSGKRGHMFVGSSPEVLVRRKGNRVTSYPLAGSAPRNFYDADADAAAGQALANSAKDHEEHAYVVEHIRRILEPLCSDLQIAERPQLDRTNEMWHLATPIEGVLKDPAPNALELASLLYPTPAVCGTPSDAAEALIVTAESDRSFYAGTVGWCDASGDGEYMVAIRCAEVNEAGTMARAWAGGGLVADSDPETELEETTAKLRTIMRSLGL

SEQ ID NO: 93719 - protein, 364 aa, Corynebacterium propinquum
  REGION 1..364: note = tr|A0A433FGB9|A0A433FGB9_9CORY Isochorismate synthase OS=Corynebacterium propinquum OX=43769; GN = D8M20_08975 PE=4 SV=1
MPQFVFNHATASVTATGIARRFASVDAALEFAHRGEHALVGAMPYHPGEPAALFIPSRLEHSDAPFLGAQAQSTKQLREVRQLHKTSYLPSLAEHTARVAQMRQRIRAGELDKIVLSRREVYQFAGAIDPWQVFAELTRNSTDCYSHFVDLGAGRYFLGNSPEVLIRKTGSVISSFPLAGSVRRQADPDKDQQVAQQLAQSSKDQHEHAFVTEGIREVLAPLCTSLTVPDEPSLMQTSHTWHLGTRILGELRDPHLSVVDLARMLHPTAAVNGAPASVAQSILAADEPDRGLYAGTVGWANENGDGEWRVAIRSALLDGDTATAYAGGGIVADSDPDTELEETTFKLGPVRAALGISGERTHGA

SEQ ID NO: 93720 - protein, 426 aa, unidentified
  source 1..426: note = Corynebacterium provencense
  REGION 1..426: note = tr|A0A2Z3YM23|A0A2Z3YM23_9CORY Isochorismate synthase DhbC OS=Corynebacterium provencense OX=1737425; GN = dhbC_1 PE=4 SV=1
MPDNSRSDLTGPDPRTAGHHTSGPGGTLTDTQLSDTQLPAAHRADFTFRRGVSGISVQARDLAPVDDWEPGLDVVGALPFDHRDGTPERLYTSGVPLTPGSLTAGAAGDRTASGVHATTVDTGRGDFFTAGVRTLLKSLESDGDLRKVVLARSVRAELDRVPDWESLLRRLSSRNRSAWVFSVPLDPTSGDRAFLGASPELLVSRRGDRIVSHPLAGSVPRSPDPDEDRRRAESLTRSSKDHTEHAYVVDMIASVLAPLCTRLDVPRHPELLATDKMWHLGTRITGKLAGDGTDALSLARLLHPTPAVGGVPTGPAVDRIRELEPVGRGYFAGTAGWCDARGDGDWVVSIRSAEFTGNRVTAWAGAGIVEGSDPDSEYTETGAKLRTVLEGLGVLPAEPEAPQASTITGTARTAGTAGTGEDAGGH

SEQ ID NO: 93721 - protein, 365 aa, Corynebacterium pseudodiphtheriticum
  REGION 1..365: note = tr|A0A3S0WJD9|A0A3S0WJD9_9CORY Isochorismate synthase OS=Corynebacterium pseudodiphtheriticum OX=37637; GN = D8M30_03265 PE=4 SV=1
MQSSRPATAPDFLLSRAHGSVRTQGCVDTYTDIDQAIQALADGQHEMIVGALPFNPNDRAALTVPESIIREDGPLEPPAFYRQGELRARISSVDPEPQEHLRRVEAAIDTIVSSRLEKVVLARAVDFEFLADVDPRLVAARLIDNSAHRDGFIADLSPAGREGHMLVGSSPEVLVKRQGSTVSAIPMAGSAARSADPVEDENARFHLQNSTKDLHEHGFVVEHLRTALSPLCEQLSIPAKPQLIKTNEMWHLATPISGQLKQPQLSALDLAARIHPTPAICGTPTAAADHLIHTAESARGFYAGAVGWCDSTGDGEYLVAIRCAEIWGRQGRTWAGGGIVADSDPEQELAETTAKLQTILRSLGL

SEQ ID NO: 93722 - protein, 367 aa, unidentified
  source 1..367: note = Corynebacterium pseudogenitalium
  REGION 1..367: note = tr|E2S458|E2S458_9CORY Isochorismate synthase; OS = Corynebacterium pseudogenitalium ATCC 33035 OX=525264; GN = HMPREF0305_11310 PE=4 SV=1
MHEDRPSTAPDFLLSRATGSVRTQGARHTFNDTDAAISALRSKDVDMVVGAIPFDSDTPAALTVPEAIIREEGPLEPHAYYRNKSLNSRVVGFDPEPEEHLRRVEAAIGTIETSKLDKVVLARAVDIEFPEAIDPRLVAARLIDLSANRDGFIADLSPAGRPGAMLVGSSPEVLVKRQGSTVSGFPLAGSSPRRTSAAEDHIAGQDLLHSAKDLHEHSFVVEHLRRVLSPLCERLDIPDTPQLISTNEMWHLGTPISGTLKDKDLTALELALAAHPTPAICGTPAEAAQALIETAETDRGFYAGAVGWCDSSGDGEYMVAIRCAEVAGDGLSARAWAGGGIVGDSDAHAELEETTAKLRTILKALSL

SEQ ID NO: 93723 - protein, 404 aa, unidentified
  source 1..404: note = Corynebacterium pseudopelargi
  REGION 1..404: note = tr|A0A3G6IZB1|A0A3G6IZB1_9CORY Isochorismate synthase DhbC OS=Corynebacterium pseudopelargi OX=2080757; GN = dhbC2 PE=4 SV=1
MNHSHSTAQHPSAIFSSATETLQATGIAQTFSSVSAAAQALHTQAVEIIVGALPFHEADPVCLFRPKRHSIRQQPLTLSSPALGPSEHDAAVSISFNHNSGEHHGRVARMVEQLKQGIAQKVVLSRQMRVDIASGEYADLVADPLWLLGRFLQGSATGDGHLLRLDAAGKRYQGAYFVGSSPELLIAKRGRYIESFPLAGTIARSADPVQDQARATELQLSAKDLHEHAFVTHDIAETLGPLCTRLDIPARPSISATSHTWHLGTKITGELRDDAISSLELAALLHPTPAVSGYPQPEARHILSEEEPERGFYAGAVGWSDAQGNGQWRVGIRSATMLPPTMDPASNASEHLRILASAGGGIVQHSDPAAEVQETQSKFGPLIQALSLSPSLIKAAEYELELQR

SEQ ID NO: 93724 - protein, 372 aa, Corynebacterium pseudotuberculosis
  REGION 1..372: note = tr|A0A4U9QSG0|A0A4U9QSG0_CORPS Menaquinone-specific isochorismate synthase OS=Corynebacterium pseudotuberculosis OX=1719 GN=menF PE=4 SV=1
MCAHRPSTAPDFLLSRTHGSIRTQGVQEAFSDPWTAIEALHSGTADLVVGALPFRRDHPCALTVPEKVIWEDGPLEPHAYYRYGEGSVLHAYLDALVPELDEHRDRVIAAIETLKASRLDKVVLARAVDMRFDPPVDPRLIAARLIDLSYNRDGFIADLSPAGEDFAGAMLVGSSPEVLIKKQGSTISAYPLAGSAPRNADKLLDARAGEELRRSPKDLVEHSYVVDHLRTLLAPLCSSLEIPQHPELTRTNEMWHLATPVVGTLKDPALTALELALVVHPTPAICGTPTDAAEEVIGIAEGDRRFYSGAVGWSNAFGDGEYMVAIRCAEVNGKGTSARAWAGGGIVADSDADAEVAETSAKLRTIMRALGL

SEQ ID NO: 93725 - protein, 453 aa, Corynebacterium resistens
  REGION 1..453: note = tr|F8DYW8|F8DYW8_CORRG Isochorismate synthase; OS = Corynebacterium resistens (strain DSM 45100 / JCM 12819 / GTC 2026) OX=662755 GN=menF PE=4 SV=1
MGLGGGATLRLRQQSGHEVRQRAGMRLGGGATLRLRQQSDGGWKNGPKARRNSAQASKSVLPDSISRLSDMTAEHQRPATAPDFLLSRPHSSIRTQGRKATYPDPFEAAQALHDGQVDLLVGAIPFKTSFRAALSQPDSVIVSEGPLEPPAFFRGQNAADKLRVESISPVTSLEEHKAAVAAAIATIRQTRLEKVVLARAVDVTFEDEPDPLLIAARLIDLSANRDGFAVDLSATGRDEDQGATFVGSSPEMLVRREGRTVTAFPLAGSTPRTGVASIDDQAARDLLMSGKNQSEHKLVVDHYRHVLEPLCDNLDIPTKPDIHETTEVIHLGTAIRGELKTDCAHYSALDLALMLHPTPAIGGTPTDDAIGIIEEVEQPREFYAGTVGWCDSAGDGEYMVAIRCCVIEGVMARAWAGGGIVADSDPEEEAEETTAKLQTALRALNVPAAMRHV

SEQ ID NO: 93726 - protein, 367 aa, unidentified
  source 1..367: note = Corynebacterium segmentosum
  REGION 1..367: note = tr|A0A3S4VMV4|A0A3S4VMV4_9CORY Isochorismate synthase OS=Corynebacterium segmentosum OX=43990 GN=menF; PE = 4 SV=1
MHEDRPSTAPDFLLSRATGSVRTQGARATFTSAEAAVDSLRRGDAEMVVGAIPFDSDTPAALTVPEFIIREDGPLEPHAFYRNQSLNSRVVGFDPEPEEHLRRVEAAIGTIETSKLEKVVLARAVDIEFAAPIDPRLVAARLIDLSVNRDGFIADLSPAGRPGAMLVGSSPEVLIKRQGSTVSAFPLAGSTPRRANKAADHIASQDLLHSAKDLLEHSFVVEHLRRILEALCSSLDIPETPQLIHTSEMWHLGTPVTGTLRDKELTALELAEVVHPTPAICGTPTEAAQALIETAETDRGFYAGTVGWCDSSGDGEYMVAIRCAEVAGDGLSARAWAGGGVVGASNAQAELEETTAKLQTILRALSL

SEQ ID NO: 93727 - protein, 367 aa, Corynebacterium simulans
  REGION 1..367: note = tr|A0A127NR36|A0A127NR36_9CORY Isochorismate synthase family protein OS=Corynebacterium simulans; OX = 146827 GN=WM42_0220 PE=4 SV=1
MHENRPATAPDFLLSRATGSVRTQGSQRTFTDVEKAIAALRDKSAEMIVGALPFNTDDPAALTEPASIIREDGPLEPPAYYRQGTLNARVTGFDPEPEEHLRRVDAAIATIQTSKLDKVVLARAVDLEFTEAVDPRLVAARLIDISANRDGFIADLTPAGREGATLVGASPEVLVKKQGSTVTAFPLAGSAPRQADKARDHLAGQDLLRSAKDLHEHSFVVDHLRRILSPLCTTLDAPSTPELINTNEMWHLGTPIAGTLKEPELTALELAMLVHPTPAICGTPTEAAQALIETAETDRGFYAGTVGWCDNNGDGEYMVAIRCAEVAGNGLSARAWAGGGIVESSNSQEELAETTAKLRTILRALGL

SEQ ID NO: 93728 - protein, 367 aa, Corynebacterium singulare
  REGION 1..367: note = tr|A0A0B6F2V0|A0A0B6F2V0_9CORY Isochorismate synthase OS=Corynebacterium singulare OX=161899 GN=menF; PE = 4 SV=1
MCDRRPASAPDFLLSRATGSVRTQGTVATFTEVDAAVTALRNGEADMVVGALPFHKGEAAALTVPESIIREEGPLEPHAYYRSGALEARVTGFDPEPEEHLRRIEAAIATIEASKLDKVVLARAVDIEFLNPVDPLLVAARLIDLSSHRDGFIADLSPAGRLGAMLVGSSPEVLIKKQGSTVTAFPLAGSAPRHADRARDIVAGQDLHNSGKDLREHAFVVDHIRRILEPLCESLDAPTSPELTSTNEMWHLGTPIAGTLKDPAITALELAELVYPTPAICGTPTEAAQALIETAETDRGFYAGAVGWCDSSGDGEYMVAIRCAEVAGDGLSARAWAGGGIVVDSEPETELQETTAKLRTILRALNL

SEQ ID NO: 93729 - protein, 372 aa, Corynebacterium sp.
  REGION 1..372: note = tr|A0A5B8NUZ2|A0A5B8NUZ2_9CORY Isochorismate synthase OS=Corynebacterium sp. sy039 OX=2599641; GN = FQV43_08640 PE=4 SV=1
MSHYRPDSAPDFLLSRAHGSVRTQGAKETFDDLDAAIKKLHDNPEEMVVGALPFRRDHKPALTVPQSIIREPGALEPHSYYRVGAGAQLNASLLSLDPSLEEHTDRIAAAIGTIEDSQLKKVVLARSVEIGFDPAVDPRLIAAKLIDLSAARDGFIADLSPAGEDFVGAMLVGSSPEVLVRKQGATIRSFPLAGSAARHSDPHLDQAQAELLLNSSKDNDEHAFVVDHLERLLRPLCSTLEIPAQPQLIRTNEVWHLATPIVGKLKNEHTTALELAAWLHPTPAICGTPTDAAEEVIALAEGDRRFYAGAVGWADGQGNGEYMVAIRCAEVSACGTKARAWAGGGIVAQSRPEDEVAETSAKLKTIMTALGL

SEQ ID NO: 93730 - protein, 367 aa, Corynebacterium striatum
  REGION 1..367: note = tr|C2CMU2|C2CMU2_CORST Isochorismate synthase; OS = Corynebacterium striatum ATCC 6940 OX=525268 GN=dhbC; PE = 4 SV=1
MHANRPSTAPDFLLSRATGSVRTQGAKKTFTDTDAAINALRTGNVEMIVGALPFNPDEAVALTEPASIIREDGPLEPHAYYRQGTLNARVTGFDPEPEEHLRRVDAAIATIQSSKLDKVVLARGVDIEFAAPVDPRFVAARLIDLSANRDGFIADLSPAGRPGAMLVGASPEVLVKKQGSTVTAFPLAGSAPRQADKARDHLAGQDLLRSAKDLHEHAFVVDHLRRILSPLCTTLDAPTTPELINTNEMWHLGTPIAGTLKEPALTALELAMLVHPTPAICGTPTEAAQALIETAESDRGFYAGAVGWCDSSGDGEYMVAIRCAEVAGDGLSARAWAGGGIVESSNSQEELAETSAKLRTILKALGL

SEQ ID NO: 93731 - protein, 370 aa, unidentified
  source 1..370: note = Corynebacterium tapiri
  REGION 1..370: note = tr|A0A5C4U7E2|A0A5C4U7E2_9CORY Isochorismate synthase OS=Corynebacterium tapiri OX=1448266; GN = FHE74_01835 PE=4 SV=1
MCAHRPSTAPDFLLSRATGSVRTQGSLATYTDPWEAADALSSGTIDMVVGALPFERSADAALAVPESIIREPGPLEPHSYYRFGPGAQLSARIAGVDPEEHEHLRRIEAALATIQTSKLDKVVLARAVDIAFDPPVDPLLVAARLIDRSSNKDGFIADLSPALEPGTMLVGSSPEVLVKRTGMTVTCYPLAGSAPRQQDPAQDRAVAETLAASTKDLSEHHFVVEHLRQALSPLCDYLEAPDVPELTHTNEMWHLATPIVGKLKNPRTSALELALRLYPTPAVCGTPTDSAEALINTAESDRSFYAGAVGWADSSGDGEYMVAIRCAEVAGDGTHARTWAGGGIVAESDAEAELAETSAKLRTILKALDL

SEQ ID NO: 93732 - protein, 370 aa, Corynebacterium testudinoris
  REGION 1..370: note = tr|A0A0G3H5C3|A0A0G3H5C3_9CORY Isochorismate synthase OS=Corynebacterium testudinoris OX=136857 GN=menF; PE = 4 SV=1
MCAHRPASAPDFLLSRAHGSVRTQGCVESFTDPWAAIDALKAGRVPIVVGALPFDRSAPAALTVPETVIREDGPLEPHAYYRQGPGSLMSATFAGVDPEPEEHLRRVEAAISTIQASKLEKVVLARAVDITFDPPVDPLLVAARLIDNSVNRDGFIADLSPAGVPGAMLVGSSPEVLIKRQGSTVSAYPLAGSAARHPDPATDTLIGKRLAASAKNLQEHAYVVEHLRSTLAPFCTRLDIAALPEVTMTNEMWHLATPIVGTLAEPALSALELALHAHPTPAVCGTPTDAAEALIHTAESDRSFYAGAVGWCDDSGDGEYMVAIRCAEVAGDGRSARAWAGGGIVADSDAEEELEETTAKLRTILRSLGL

SEQ ID NO: 93733 - protein, 321 aa, Corynebacterium tuberculostearicum
  REGION 1..321: note = tr|C6R8S1|C6R8S1_9CORY Isochorismate synthase; OS = Corynebacterium tuberculostearicum SK141 OX=553206; GN = CORTU0001_2030 PE=4 SV=1
MVVGAIPFDSDTPAALTVPEAIIREEGPLEPHAYYRNKSLNSRVVGFDPEPEEHLRRVEAAIGTIETSKLDKVVLARAVDIEFPEAIDPRLVAARLIDLSANRDGFIADLSPAGRPGAMLVGSSPEVLVKRQGSTVSAFPLAGSSPRRASAAEDHIAGQDLLHSAKDLHEHSFVVEHLRRVLSPLCERLDIPDAPQLISTNEMWHLGTPISGTLKDKDLTALELALAAHPTPAICGTPAEAAQALIETAETDRGFYAGAVGWCDSSGDGEYMVAIRCAEVAGDGLSARAWAGGGIVGDSDAQAELEETTAKLRTILKALSL

SEQ ID NO: 93734 - protein, 367 aa, Corynebacterium ulcerans
  REGION 1..367: note = tr|A0A448GAU1|A0A448GAU1_CORUL Isochorismate synthase OS=Corynebacterium ulcerans OX=65058 GN=menF PE=4; SV = 1
MCVHRPSTAPDFLLSRATGSVRTQGSVATFDEVDAAVSALRSGEAEMVVGALPFHKGEAAALTVPESIIREDGPLEPHAYYRSGALEARVTGFDPEPEEHLRRIEAAIATIEASKLGKVVLARAVDIEFLTPVDPLFVAARLIDLSSHRDGFIADLSPAGRPGAMLVGSSPEVLIKKQGSTVTAFPLAGSAPRHADRARDIVAGQDLHNSAKDLREHAFVVDHIRRILQPLCESLDAPTSPQLTSTNEMWHLGTPIAGTLNDPSITALELAELVYPTPAICGTPTEAAQALIETAETDRGFYAGAVGWCDSSGDGEYMVAIRCAEVAGDGLSARAWAGGGIVVDSEPEAELQETTAKLRTILRALNL

SEQ ID NO: 93735 - protein, 380 aa, Corynebacterium urealyticum
  REGION 1..380: note = tr|B1VG39|B1VG39_CORU7 Putative isochorismate synthase OS=Corynebacterium urealyticum (strain ATCC 43042 / DSM 7109) OX=504474 GN=cu0768 PE=4 SV=1
MDSDKRPVTAPDFLLSRPHHSIRTQGRKATFPDPFEASTALREGTAELLVGAIPFNTGFRAALMEPEKVVTFDGPLEPPAYFRGREAAESLEAVEVTVATTKEEHQARVAAAIQTIRRTSLEKVVLARVADVYFADTIDPLLVAARFIDLSANRDGYAVDLSATGRKEDQGAMFAGSSPEMLVSRKGRTVRAFPLAGSAPRTGVAERDDATAEELRSSEKNLVEHALVVEHYRRILEPLCSELDIPTEPLIHETTEMIHLGTPIVGTLADAAYSALDLALMLHPTPAIGGTPTDEAVGIIESVEEPREFYAGAVGWCDADGDGEWMVAIRCACVEGDSARVWAGGGIVADSDPHEEAEETTAKLQTALRALNVPAAMRDV

SEQ ID NO: 93736 - protein, 370 aa, unidentified
  source 1..370: note = Corynebacterium uterequi
  REGION 1..370: note = tr|A0A0G3HE04|A0A0G3HE04_9CORY Isochorismate synthase OS=Corynebacterium uterequi OX=1072256 GN=menF; PE = 4 SV=1
MSARRPTTAPDFLLSRAHGSVRTQGARKTFTDPWAAADALHDGDVPMVVGALPFERSAPAALTVPKKIIRESGPLEPHSYYRFGPGARLSARIEHVDPAEHEHLRRIEAAIETIRNSKLDKVVLARAVNIAFDPPVDPLLVAARLIDRSNNRDGFIADLTPAGLDGHMLVGSSPEVLVRRHGSVISAYPLAGSAPRHEDPARDAEAGYLLAESAKDLSEHQYVVEHLRAALGPLCSRLDAPAVPELTKTNEMWHLATPIVGELANPATTALELALRIYPTPAVCGTPTDAAEALIQTAESDRSFYAGAVGWCDNTGDGEYMVAIRCAEVAGDGRSARAWAGGGIVADSDADEELAETSAKLRTILRSLDL

SEQ ID NO: 93737 - protein, 380 aa, Corynebacterium variabile
  REGION 1..380: note = tr|A0A0X2NQA3|A0A0X2NQA3_9CORY Isochorismate synthase OS=Corynebacterium variabile OX=1727; GN = CVAR292_02239 PE=4 SV=1
MTYLDRPATAPDFLLSRSSGSLRTRGSRANWPDPFEAATALRNGDAGLIVGAVPFDTANRAALTVPEVITESEGPLEPPAHYRGLDAGQKAEVLSVTPLTTSEEHQTTAAATIATIQNTTLEKVVLARAVDVEFAEEVDPLLIAARMIDLSARRDGFAVDLGATGRHDDKGTLLVGSSPELLIRRRGTTVEALPLAGSAARLRDRDADVTVGRMLQDSVKDLSEHRWVTDHYERVLSQVCTELSVPDRPELIQTNEMWHLGTRIQGTVPEDGPSALDLALMLHPTPAVGGYPTHEALGIIDEVEEPRDFYAGFVGWCRADGDGEYMVSIRCAEVAGAGARAWAGGGIVANSSAAAETAETTAKLQTALRALNVPAALRAV

SEQ ID NO: 93738 - protein, 385 aa, Corynebacterium xerosis
  REGION 1..385: note = tr|A0A494RPA8|A0A494RPA8_9CORY Isochorismate synthase OS=Corynebacterium xerosis OX=1725 GN=D4R08_04250; PE = 4 SV=1
MTSEGDECVRGRRGPFDGRPATAPDFLLSRSHGSVRTQGSLATYSDPWLAAERLRRGEHQMVVGAIPFNSERPAALTVPREIIRSEQPLEPPAHYRWNSPEIKARIVGHDPAPEEHLERLDAAIRTIKVSGMDKVVLARAIDLAIDPAIDPLQLSSRLIDGSPNRDGFVADLGPAGGRFTGRMLIGSSPEMLVRRRGRIVEAFPLAGSAPRSRDRAADEAAAAKLMASRKNNEEHEFVVDDIADNLAPLCSHLDVPHEPQLLSTSEMWHLGTFIRGELKDPVISALDLALLVHPTPAICGTPTESAMSVIEAIESDRGFYAGCVGWCDSEGDGEFVVSIRCAEIDAAGTEARLWAGGGIVADSNPEEELAETTAKLRTVLRAFGL

SEQ ID NO: 93739 - protein, 454 aa, Cosenzaea myxofaciens
  REGION 1..454: note = tr|A0A198GG52|A0A198GG52_9GAMM Isochorismate synthase MenF OS=Cosenzaea myxofaciens ATCC 19692; OX = 1354337 GN=menF PE=3 SV=1
MENVSSVFLTLCEEVKKINLTASDELLHLTIALPSEISFSLLAWLAAQTHYPQFYWQHRDETEEVAVCGQLCCFNHIRDAQQFLISKKKKFNDIENVRFWGLNAWDTIIPGHIDKRYGDDAYLFLPRIEIRRHQQHCTVHLNLLGNDDKESVLDFLNTLNNEFNIEPLSSSVISVEHSLSQEQWKNYLNIALDEINQGLFEKVVPARATCLTLESPLKAIQFMNASRDVNHKCYHYMLAFSPTDAFMGSSPERLYLRDNFMLYTEALAGTVASSDNDEQATKLANWLMNDTKNQHENLVVVDDICQRLQGGIEGIDVSPADVIRLRKVQHLRRYIHGKLIDNNDVDCLSRLQPTAAVCGLPRTIAREFIRQHEPFERRWYAGSAGFLGLPRTEFAVSLRCGELHDNTLTLYAGAGVVAGSDPEQEWVEIENKAAGLRTLLQEKQSVIEKEFVIE

SEQ ID NO: 93740 - protein, 366 aa, unidentified
  source 1..366: note = Criblamydia sequanensis
  REGION 1..366: note = tr|A0A090DY59|A0A090DY59_9BACT Putative menaquinone-specific isochorismate synthase OS=Criblamydia sequanensis CRIB-18 OX=1437425 GN=menF PE=4 SV=1
MAPIRNKPYPAFDMIEAFLNNGSLLQFDKKRLLIGWGEKIFRDNPSYSSEKPTFYFPDFFLEDETKATFNHEFNSLIEVDELTESLNVGSESYDYKWETEGELLFKETVDKHNECFQTNRLKKVVPYVFEAAKWQLKKERIGQWIRSLIKESKPFPLSLYGTWDEHFGLLGATPEILFNLDEDKKELKTIALAGTLESTINEKVLIDQKTFQEHQFVIEGIREDLSPFGKVEIGEREQADFGNLLHFFTPIILKWNTFPSFFEMIRALHPTPALGAYPKFEGFQWLKKYNEALPRYRFGAPAGFSFPAMNKYCCYVAIRGMQWDDKEVRIGAGCGIVKGSKRDEEWKEIKLKMSMIKKLFQIPIKP

SEQ ID NO: 93741 - protein, 433 aa, unidentified
  source 1..433: note = Cricetibacter osteomyelitidis
  REGION 1..433: note = tr|A0A4R2T1K1|A0A4R2T1K1_9PAST Isochorismate synthase MenF OS=Cricetibacter osteomyelitidis OX=1521931; GN = menF PE=3 SV=1
MNALQTLRVQLTEQLNALQSHSSQNAISVLKAQIAVNDMNWLAWLKAQQSYPQFYWRHRDNMQTVISVGKVRSFSQLNSADYFIQQHSTTLVGGLTFNGECQFYLPRLLLSAEPKSVTAYLTLDHQADPIQEQQAILAVLENLAKSTALSAVSQSIELMKQSADQTLWCGWVKKALNAIAHTDLTKVVLANETEFVTQSLNSKDFLAESEKQNAGCYHFLWAENPYTAFVGSTPERLYARNRSHLQTEALAGTAFMTADEQENQRLAQWLLNDEKNLYENQLVVDDICQNLHSFVTEINIQQVELKQLRQVQHLRRRIFAELAEQYSDQHCLMAIHPTAAVSGLPQQSAMQFLQNTENFDRSWYAGTLGFMNRQAAEFCVTIRSAFIENGEQSKIRVFAGAGIVAGSIPLLEWQEIERKAAGLVSLLQSKEIE

SEQ ID NO: 93742 - protein, 487 aa, unidentified
  source 1..487: note = Crinalium epipsammum
  REGION 1..487: note = tr|K9W4F1|K9W4F1_9CYAN Isochorismate synthase; OS = Crinalium epipsammum PCC 9333 OX=1173022; GN = Cri9333_3865 PE=4 SV=1
MINKMQTSLLNFSAMTVTPYRNPQLIECKDLYQFLSACKQTAQQKDQTKIISISLEMPPVDPLAVMAAMAKPGQLNFYFEQAGHEVAIAAIDAVVSLKVAGSSRFEQAQHFIKSCFSSTMIAGADDLALTGPHFFCNFTFFDEPLNGDLTFPPATIFLPRLQFSKYKNKGILVLNIEINQLKNHEFLFKEILSKIEIIKNSSQIKSNHIYNSLENYCNLSFNNINKFKSSVTSALESIRCNKLNKIVLAHAVDVKSPAPFKIIDSLDNLRQRYPGCYIFSTSNSKGQTFIGASPERLISIKNQQLFTDSLAGSAPRGTTAIEDAEFGDRLLSSEKERREHLVVLDFITQRLTKLGLAPVSPQLPQLLKLANIQHLWTPIQARMPSCVHPLEIVAELHPTPAVAGLPRKIACQQIRTFELFERSLYAAPIGWVDHQGNSEFIVGIRSALIDGDRARLYAGAGIVAGSEPDKELAEIQLKLQALLKALV

SEQ ID NO: 93743 - protein, 485 aa, unidentified
  source 1..485: note = Crocosphaera watsonii
  REGION 1..485: note = tr|T2IA07|T2IA07_CROWT Isochorismate synthase @ Menaqui  none-specific isochorismate synthase; OS = Crocosphaera wa  tsonii WH 8502 OX=423474; GN = CWATWH8502_3379 PE=4 SV=1
MSVATPIIPETTKLRYNQHNLEQLFLSHQATLEGQNQSTIVSLYQIIPEVDTLSVLECLTSENNSDLSQNKTYFYWENKANREAILGYGMTESCQLNIESRFRDSKKFVNNCFQKLTKVNHDDSSTSFPHVFCGFTFFSETNQLKFPFPSAFAFLPKLEIIKQKEKQILILNLLIDYQTDIKKLVHQTMANLKLITKIKTYQNLDKPIKIPVNLMNKYEIGQGFKSSVASVLESIEANDFEKLVLASALDLSSFHDISIINCLRNLRNNHPDCYIFAINNGENNCFLGASPERLISLKNNQLLSDALAGSIARGNTKREDYYLAQHLLKSSKERREHQVVIEFIVQRLISLGLSPQISPLKVLKLSNIQHLWTPIYTQLSPNIHPLEVVAELHPTPAVSGFPTEVTCQEIKRYESFERGFYAAPLGWIDYNGNSEFIVGIRSALISGNQARLYAGAGIVEGSEPDKELAEIQLKFQGLLKALSYC

SEQ ID NO: 93744 - protein, 428 aa, Cronobacter condimenti
  REGION 1..428: note = tr|K7ZYT0|K7ZYT0_9ENTR Isochorismate synthase MenF; OS = Cronobacter condimenti 1330 OX=1073999 GN=menF PE=3 SV=1
MNTFAAALAQAEEALNDAPDSPGVYRRAFAFCAYDHDFLAWLSAQAAFPQFYWRSRDGDEEVAALGAAQAFASLDEAQAFLRQHEDEPDLRACGLNAFDPAHGFLFLPRLALHREGERASLVVTLFSEHSRRQAAEALQRNLRSLQTPRLLPPGAPPLVSRCDCPQAKAWTRLVARASEAIARGDIAKVVLARATDLRFASPPDAAALMAASREANHYCYHFYLAFSARDVFLGSTPERLWRREGCALATEALAGTVENHPDDAQASARAAWLQDDDKNRRENALVVDDICARLQAIARDVHIQVAQVVRLRRVQHLKRVIFGRLLRADDAACLRQLQPTAAVAGLPREAARRFITDNEPFDRAWYAGSAGYLSKEKTEFCVSLRAARITDDTVRLYAGAGLVAGSEAALEWQEIENKAAALLSLLTG

SEQ ID NO: 93745 - protein, 388 aa, Cronobacter dublinensis
  REGION 1..388: note = tr|K8AJ32|K8AJ32_9ENTR Isochorismate synthase [enterobactin] siderophore OS=Cronobacter dublinensis 1210; OX = 1208656 GN=BN134_1400 PE=4 SV=1
MDTSLAGECRKATASLSSDSFFFMSPYHSFTTRGCFARIDTPAVDGEARHGVFQTALRDAFDRARRSGIARPMVVGAIPFDTRQPSALFIPESRSDFTPAGYALPERAAAPRVKSRTELPEQEAFMAMVARAAALTDTPEVSKIVLSRLIDLTTDTPPDSLALLARLVAQNPASFNFHVPLPDGGTLLGASPELLLRKDGNTFSSLPLAGSARRHADAREDNAAGQALLCSAKDRHEHELVTQAMRDLLVPRSHRLAMPGAPELITTPTLWHLATPVEGETRFADDNALSLACLLHPTPALSGFPHEAAKASIAELEPFDRELFGGIVGWCDAEGNGEWVVTIRCARLCGNQVRLFAGAGIVPASDPLSEWRETGTKLSTMLHVLGLH

SEQ ID NO: 93746 - protein, 429 aa, Cronobacter malonaticus
  REGION 1..429: note = tr|V5TWM1|V5TWM1_9ENTR Isochorismate synthase MenF; OS = Cronobacter malonaticus OX=413503 GN=menF PE=3 SV=1
MNTLAAAQALAEKALADVPDIPGLWRCAFEFSPESNDFLAWLGAQPGYPQFYWRSREGHEEAATLGAACTFLSLNEAQAFLRQYADTPGLRAWGLNAFDPQTGLFFIPRLELRREGDRAWLMVNLYSACSQRKAAQALKPLIHNLQPARQTLLQPAPRRVSRCDTPQAQQWAQLVGAATHAIERGDFAKVVLARATDLRFVAPPDATALMAASREANHHCYHFYLAFSAREVFLGSTPERLWRRNGLALDTEALAGTVENLSDDGLAQARAIWLLNDDKNRRENALVVEDIRERLQAIAHSITARLPEVVRLRRVQHLRCAISARLFAPDDGACLHQLQPTAAVAGLPREAARRFIADHEPFDREWYAGSAGFLSLESAEFCVSLRSARLKDKTIRIYAGAGLVAGSQAALEWQEIENKAEALLTLLTD

SEQ ID NO: 93747 - protein, 148 aa, Cronobacter sakazakii
  REGION 1..148: note = tr|K8CSL6|K8CSL6_CROSK Isochorismate synthase [enterobactin] siderophore OS=Cronobacter sakazakii 701; OX = 1208663 GN=BN129_2192 PE=4 SV=1
MTQAMRDVLAPRSQRLAMPGAPELITTPTLWHLATPVEGETRFADDNALSLACLLHPTPALSGYPHEAAKAYIAELEPFDRELFGGIVGWCDADGNGEWAVTIRCARLRENQVRLFAGAGIVPASDPASEWRETGVKLSTMLHVLGLH

SEQ ID NO: 93748 - protein, 429 aa, Cronobacter turicensis
  REGION 1..429: note = tr|A0A2T7B0S0|A0A2T7B0S0_9ENTR Isochorismate synthase MenF OS=Cronobacter turicensis OX=413502 GN=menF; PE = 3 SV=1
MNTLAAAQALAEKALADAPDTPGLWRCAFEFSPESCDFLAWLGAQPGFPQFYWRSREGHEEAATLGAACTFSSLDEAQAFLRQHADTPGLRAWGLNAFDPQNGLFFVPRLELRREENRAWLIVTIYSACSQQKAAQALKPLIHNLQPARQTLLQRPPRRVSRCDVPQAQPWTELVGAATSAIDRGDIAKVVLARATDLRFIAPPDATALMAASREANHHCYHFYLAFSAREAFLGSTPERLWRRRGLALDTEALAGTVENLPDDDQAQARAAWLLADDKNQRENTLVVEDIRERLQAIAHSISARLPEVVRLRRVQHLKCAITARLYAPDDAACLRQLQPTAAVAGLPREAARRFIAEHEPFDREWYAGSAGYLSLEQSEFCVSLRSARLKDETIRVYAGAGLVAGSQAALEWQEIENKAAALLTLLAQ

SEQ ID NO: 93749 - protein, 388 aa, Cronobacter universalis
  REGION 1..388: note = tr|A0A376ERY7|A0A376ERY7_9ENTR Isochorismate synthase entC OS=Cronobacter universalis NCTC 9529; OX = 1074000 GN=entC PE=4 SV=1
MDTSLAGERCDAAASLSSDSFFFMSPYRSFTTRGCFTRLETPAADGAERHGVFQTALRDAFDRARRQGIARPIVVGAIPFDTRKPSALFIPESYSDTARGGYSLIDNSAAPRVIRREALPDEATFRAMVARAAALTATPAVSKIVLSRLIDITTGQAPDSLALLARLVAQNPASFNFHVPLPDGGALLGASPELLLRKDGDTFSSLPLAGSARRHADAAQDKSAGQALLCSAKDRHEHELVTQAMRDVLAPRSQRLAMPGAPELITTPTLWHLATPVEGETRFADDNALSLACLLHPTPALSGYPHEAAKAYIAELEPFDRELFGGIVGWCDADGNGEWAVTIRCARLRENQVRLFAGAGIVPASDPASEWRETGVKLSTMLHVLGLH

SEQ ID NO: 93750 - protein, 379 aa, Cryobacterium flavum
  REGION 1..379: note = tr|A0A4R8V0I1|A0A4R8V0I1_9MICO Isochorismate synthase OS=Cryobacterium flavum OX=1424659 GN=E3O21_16130; PE = 4 SV=1
MRRNQGLAGIGCALRLEFSGPTRMTDAAAAWKQVARLATVTDPLARTGTGLLAFGAFAFDESSVQTSVLIVPEIIVGREDGQCWVTRIWATGQSAPENPLALHPLGDEYRIALLPGALPPDGFRAAVSSGIEHIRAQQVNKVVLARDLVGRVPAESDLRRAITKLALGYPDCWTYAVDGLIGSSPETLIRADHGSVNARVLAGTISRGADAEDDREAALALATSSKDGDEHEFAVQSVLKSLRPHTSVLATSEIPFTVKLPNLWHLATDLEGTLSDGSTSLDLIAALHPTAAVAGTPTDQALNLIRELEPFDRGRYAGPVGWVGADGDGEWAIALRCAQVAPEGGITAYAGCGIVLDSDPERELAETKMKFRPIVEAFG

SEQ ID NO: 93751 - protein, 379 aa, unidentified
  source 1..379: note = Cryobacterium levicorallinum
  REGION 1..379: note = tr|A0A4R8VRB0|A0A4R8VRB0_9MICO Isochorismate synthase OS=Cryobacterium levicorallinum OX=995038; GN = E3O11_06370 PE=4 SV=1
MRRNQGLAGIGCALRLEFSGPTRMTDAAAAWKQVVALATVTDPLARTGTGLLAFGAFAFDESSAQTSVLIVPEIIVGREDGQCWVTRIHVTGQSAGANPLALHPLGDEYRIALLPGALPPADFRTAVSSGIERIRAQQVNKVVLARDLVGRVPAESDLRRAISKLALGYPDCWTYAVDGLIGSSPETLIRADHGSVNARVLAGTISRGADAEDDREAALTLATSSKDGDEHEFAVQSVLKSLRPHTSVLATSEIPFTLKLPNLWHLATDLEGTLSDGSTSLDLIAALHPTAAVAGTPTLEALSLIRELEPFDRGRYAGPVGWVGADGDGEWAIALRCAQVAPEGGITAYAGCGIVLDSDPDRELAETKMKFRPIVEAFG

SEQ ID NO: 93752 - protein, 384 aa, Cryobacterium luteum
  REGION 1..384: note = tr|A0A5F0D4F0|A0A5F0D4F0_9MICO Isochorismate synthase OS=Cryobacterium luteum OX=1424661 GN=E3O10_12320; PE = 4 SV=1
MRRNQGLAGIGCALRLEFSGPTRMTDAAAAWKQVVALATVTDPLTRTGTGLLAFGAFAFDESSTEASVLIVPEIIVGREDGQCWVTRIWATGENAPEQSMAKDPLVLHPLGDEYRIALLPGALPPDDFLTAVSSGIERIRAQQVNKVVLARDLVGRVPAESDLRRAITKLALGYPDCWTYAVDGLIGSSPETLIRADHGSVNARVLAGTISRGADAEDDREAALTLATSSKDGDEHEFAVQSVLKSLRPHTSVLATSEIPFTVKLPNLWHLATDLEGTLSDGSTSLDLIAALHPTAAVAGTPTDTALSLIRELEPFDRGRYAGPVGWVGADGDGEWAIALRCAQVAPTGGITAYAGCGIVLESDPERELAETKMKFRPIVEAFG

SEQ ID NO: 93753 - protein, 437 aa, Cryobacterium mesophilum
  REGION 1..437: note = tr|A0A4V3I9U3|A0A4V3I9U3_9MICO Isochorismate synthase OS=Cryobacterium mesophilum OX=433647; GN = E3N84_08765 PE=4 SV=1
MPPVYSATPTACRARGDGYAGSVSVPEQTVPALTVSTVAIDDVESTLELLPPRRQLLWLRRGDGMAGFGEAARLEFSGPTRMTDAAAAWRRVAAAASVEDGIGVPGSGLIAFGAFAFSDHSPATSVLVVPSVVLGRRNGRAWLTRIRAGNDIDAPVPSTRSAVHSAPVAFTAGALPPDAFLAAVDAALNRIDGVGLSKVVLAREIVGRLTGPADTAAVLSALATGYPDCWTFAVDDFLGSSPETLVAVTKRTVTARVLAGSAARGTDAATDQQASLALATSAKDQDEHQYAVQSVLAALRPHSPGVTSSEQPFTLRLPNLWHLASDVEGTVADGSSSLDLIDALHPTAAVAGTPTPAAVALIEELEPFDRGRYAGPVGWVGGDGDGEWAIALRCCQVEPDGTVRAYAGAGIVAESVAEHELAETSLKFRPIVEAFAG

SEQ ID NO: 93754 - protein, 379 aa, Cryobacterium psychrophilum
  REGION 1..379: note = tr|A0A4Y8KMX3|A0A4Y8KMX3_9MICO Isochorismate synthase OS=Cryobacterium psychrophilum OX=41988; GN = E3T53_08315 PE=4 SV=1
MRRNQGLAGIGSALRLEFSGPNRMTDAASAWQAVVAAATVTDPLQRTGTGLLAFGAFAFDESSAQTSVLIVPEVIVGRENGQCWVTRIWPTGASAPTHPLTLDPLGNEYRIRLLPGALPAAEYRTAVAQAVARIAEQPLNKVVLARDLVGRLPEESDLRRAITKLALGYPDCWTYAVDGLVGSSPETLIRADHGDVNARVLAGTISRGVDAVSDTEAALALATSNKDGDEHEFAVQSVLKSLRPHTSVLTSSDIPFTVKLPNLWHLATDVEGTLSDGSTSLDLIAALHPTAAVAGTPTESALDLIRELEPFDRGRYAGPVGWVGADGDGEWAIALRCAQVSSTGAVTAYAGCGIVLDSDPERELAETKMKFRPIVEAFG

SEQ ID NO: 93755 - protein, 379 aa, Cryobacterium sp.
  REGION 1..379: note = tr|A0A5F0GP19|A0A5F0GP19_9MICO Isochorismate synthase OS=Cryobacterium sp. TMT1-2-1 OX=1259232; GN = E3T33_03275 PE=4 SV=1
MRRGQGLAGIGTALRLEFSGPGRMTDAALAWRRVVEAAAVTDPLARTGTGLLAFGAFAFDESSAEASVLIVPQVIVGREDGQCWVTRIWPTGSDAPDIPLELHPLGDEYRVALGPGSLSAAGYRAAVAEAVGRIAAQDLSKVVLARDLAGRLPAAADLRRPITELALGYPDCWTYAVDGLFGSSPETLIRADHGEVNARVLAGTISRGADPVADTEAALALATSTKDGDEHEFAVQSVLQSLRPHTSHITTSEIPFTVKLPNLWHLATDLEGTLSDGSTSLDLIAALHPTAAVAGTPTASALALIRELEPFDRGRYAGPVGWVGADGDGEWAIALRCAQVGPDGDVTAYAGCGIVLDSDPEKELAETRMKFRPVVEAFD

SEQ ID NO: 93756 - protein, 360 aa, unidentified
  source 1..360: note = Cryomorphaceae bacterium
  REGION 1..360: note = tr|A0A368D6J2|A0A368D6J2_9FLAO Isochorismate synthase OS=Cryomorphaceae bacterium OX=1898111; GN = DBW79_02270 PE=4 SV=1
MLIKKIKNLELIMISCPDFFLRLNFFYNQKTPFVCFRLPGTNTLKCYNGKEQKINHKAFPKDPGFIMMPFDKSKEGYFISSKTMFEAKILSDSLKNSLTEEFNQQEKFNSHKENYLKKIVDIKNTISKTELIKVVYSNSFELDLIENNFEAYFKKLLRLHKDAFCYLFYIPNEGYWMGASPETLLEVQDKKITTMALAGTKKRNVVRWGNKEILEQKIVKDEIKKRLTPLCKNLETTNSSTIKAGGIDHLKTTISGTTISSPSQIINAIHPTPAVGGAPKEKALLIIKKEESHNRSFYSGYLGEIDNMNCKLFVNLRCVHVKINKAKIFVGGGITVDSKPEKEWEEIINKSQTILKALFR

SEQ ID NO: 93757 - protein, 419 aa, Curtobacterium flaccumfaciens
  REGION 1..419: note = tr|A0A502BXQ3|A0A502BXQ3_9MICO Isochorismate synthase OS=Curtobacterium flaccumfaciens OX=2035; GN = EAH85_13275 PE=4 SV=1
MTRTTTAAPPLTVSTRILDDPGTVLRHTLRDRPLAFVRNGDGIVGIGEALRFTFTGPDRMRDAAALWRSVVATAVVDDPVQLRGSGLVAFGSFAFADDSADESVLIVPRVVLGRRRGKAWLTAIDTTAGAEPLAFTRTSVPVPRVGPHVSVELRPGQIDEATYAANVSEAVRRIVAGSAQKVVLARDLVGTLPSGADRRAVLLDLAAAYPQCVTFAVDGLVGATPETLARTDGTRLTARVLAGSAARGTDEVSDRAAAEALASSAKDVEEHAFAIDSLLAALAPLATDLRADAEPFRLQLPNLWHLATDVQATLPPDTTSLDVADALHPTAAVAGTPTDLAVRLVAELEGVDRGRYAGPVGWMSATGDGEWMLALRSARIDDDGTVRAWAGAGIVAGSEPEREVAETALKFRPITDALA

SEQ ID NO: 93758 - protein, 419 aa, Curtobacterium sp.
  REGION 1..419: note = tr|A0A433FWW5|A0A433FWW5_9MICO Isochorismate synthase OS=Curtobacterium sp. HSID17257 OX=2419510; GN = D8M35_07565 PE=4 SV=1
MTRTTTATPTLTVSTRILDDPGDVLRHTLRDAPLAFVRSGDGIVGIGEAARFTFSGPDRMRRASAVWRDLVRGATVDDPVQLRGTGLVAFGSFAFADDSAEQSVLVVPRVVIGRRRGKAWLTAVDTTPDPAPLTFSRTSVPVPAVGGHVSVALGPGQVDEDAYAAAVADAVRRITAGEAEKVVLARDLVGTLPAGADRRAVLLDLAAAYPQCVTFAVDGLVGATPETLARTDGTELSARVLAGSAARGTDPVSDRAAAEALASSAKDVEEHGFAIASLLHALRTVATDVRADPEPFRLQLPNLWHLATDVRATLPVGTTSLDVADALHPTAAVAGTPTDVAVRLVAELEGVDRGRYAGPVGWLGANGDGEWMLALRSARIEDDGTVRAWAGAGIVAGSEPAREVAETALKFRPIRDALA

SEQ ID NO: 93759 - protein, 428 aa, unidentified
  source 1..428: note = Cutibacterium acnes
  REGION 1..428: note = tr|Q6A6F5|Q6A6F5_CUTAK Menaquinone-specific isochorismate synthase OS=Cutibacterium acnes (strain DSM 16379 / KPA171202) OX=267747 GN=PPA1940 PE=4 SV=1
MRRCCPCGHLGYPATVIVDPGSARLCARTVSISDPGPLENYMTPNDSVCFLHRNYGMVGLGEVTRFETDSPAAADVWWEALCDDLEHETEMPDAEATGPVAFGSFTFDPDRSSSRSVMILPKTIIGRWPGYSWLTQLSWDSITDDSPHQQSVPRPPGAVTVRDGVVSERSWRQVARLVQDIMSPGELDQIVLMRDVEAKASSSIDPRWIVETLRRQFPNAYTYLVEGSVGTTSKLTVGVSKSLITSRVLTHSPATDANHQTLLTALQGKGPLAAYHDEIVGRTCARLEQFCDTVHVPDCPGCVYNDASTYLVTDVTGIHSPDQGSCLALVQALCPPAFVTGLPPHCALSVLAEIEHVDRGRVSGPTGWVDSLGNGQWVTDCRGGQIDATDPSLVHIFSGHPVGHDDDADVLSAEAEHRIDVLRDLFLT

SEQ ID NO: 93760 - protein, 396 aa, unidentified
  source 1..396: note = Cutibacterium avidum
  REGION 1..396: note = tr|G4D035|G4D035_9ACTN Isochorismate synthetase; OS = Cutibacterium avidum ATCC 25577 OX=997355; GN = HMPREF9153_2057 PE=4 SV=1
MHTLSCDVDLSAASGARWLDTARRYCPPEVEPWIWVAPDTDDAPAMVGWGEQARFTAGGHGAAAKAFNAYSSWAAQHSDAAPVAFGSFPFSRDEDGFLVVPAVLLLRRHLGERTLVFCADPTPIHRGDSDLPVIETQLPDLDAENWGQAVNAATTRLSQDPELEKVVLSRSVTVQASAPMDRGLVASRLSGKFSGCWTYCHDGLVGATPELLVDCRDGLFRCRVLAGTRKPSWSHELLQDPKEHREHELAVASVTDRLSEAGLSDPAVRGPFLLELPNVTHLATDITARVGTSNAAQIVDVIHPTAAVCGTPRELAYQFIEQTEVIDRGRFAGPVGWMSPDGSGQWALALRCGQFSEDNRSVRVHAGAGIMPSSDPDKEWIETGAKMEAFTSALEG

SEQ ID NO: 93761 - protein, 434 aa, unidentified
  source 1..434: note = Cutibacterium granulosum
  REGION 1..434: note = tr|A0A239WIE3|A0A239WIE3_9ACTN Isochorismate synthase entC OS=Cutibacterium granulosum OX=33011; GN = entC_2 PE=4 SV=1
MTVLPCSDGITALPGAQWLAEVLAWVPDGVDPWVWLAPDEDDAPAMVAWYEQCRFTARGENGIEQAWRQMVDWAREQPEGTCPIAIGSFPFDRSDGGFLVVPQVLIMRRHVGAPTQVFGAEEPLTRARTCWPHDDSHAAARPVDGNLEIDGLSSEASSLCRETVGANGHIVTSTPVITEEEWTTTVHRAVDELTSDRGLQKVVLAGAQDLTSDVPMNRSHVAATLARRFPGCWTYSADGLVGATPELLVDCRDGLFRSRVLAGTRKPEWADELLDDPKEQHEHELAVTSVLDKLADAGVGTPAVHGPFQLRLTNVVHLATDITAHVDGSNAARIVDAMHPTAAVCGAPRGQARELIAEVETLDRGRFAGPVGWMDTTGAGQWALALRCGQFSTDSHQVRLFAGAGIMPTSDPHHEWIEIGAKMQAFSSVLETQH

SEQ ID NO: 93762 - protein, 504 aa, unidentified
  source 1..504: note = Cyanobacteria bacterium
  REGION 1..504: note = tr|A0A3M1P5X9|A0A3M1P5X9_9CYAN Isochorismate synthase OS=Cyanobacteria bacterium J069 OX=2420337; GN = D6742_18140 PE=4 SV=1
MPVVPRPIEPVQDCKALYQLLSECQQHLNESRNESRNESRNQLLSSQLKPEAPSDCLWISISLEIDPVDPLLALQQFNTSSQPHFYFEKPYEGEAIAAFGNASVLYTGGDRRFLKAQKFLQRSLDNLFHQPPKHPSKASAVITTTPADLRYFCSFTFFDETHTIQSPFASAIVLLPEWQILRQPDRCVATANVVLYADTNLTTLTDSLWLKFQKIQQANYSLLGYTNYDPITPQSWNFLEINDFQKAVTSALHSIHKNHLQKLVLSHAVDVISRRPFEWLFSLHNLRQIYPDCCIFSVNQGTGKTFIGASPERLVSVRNQQLTTDALAGSAPRGRTAREDAAFAQLLMSTPKEQHEHQVVVDFLRDRLFQLGLSPQLPAAPDLLRLSNIQHLHTPIHAHLPAGLHPLELVDALHPTPAVAGLPRDIACEEIRRYEGFGRSLYAAPLGWVDAAGNAEFIVGIRSAMLGGDRARLYAGAGIVAGSDPARELAEVKLKLQALLKALV

SEQ ID NO: 93763 - protein, 476 aa, unidentified
  source 1..476: note = Cyanobacterium aponinum
  REGION 1..476: note = tr|K9Z0A7|K9Z0A7_CYAAP Isochorismate synthase; OS = Cyanobacterium aponinum (strain PCC 10605) OX=755178; GN = Cyan10605_0457 PE=4 SV=1
MAIIPNHLSVLDYIQEFKKLIFSSSFNIKNNSSPSPIFSISCEVEPIDPLIFISVLQTDKQPVFYWQNQRKKEAIAAIGAIKSLNIDKNICQQDKDIDRFQKCQEFINNNQKLIHILNKDQDNYQPHFFTYFRFFEQSHNFDNKSFPLATIFLPFIQLIKKDNKYSVTINTYNQNKKEILDYLKDNFSEKIELNYKVNYSQENKINSHLENAKYQGFIDKVNKGLEAIKSEKLTKIVVAHALEIKTENKFNIVKSLENLRNNHPDCYIFSIGNEDQEYFIGASPERLLSIKDNQLVSDALAGSAPRGKNEDEDFLIGNNLLDSEKEKREHQAVSNFIFNQLSAMGLQPKKASLQLLKLSNIQHLWTPIYAEIKEEINPLEIVRQLHPTPAVAGVPIEVACQEIETSEKFDRSLYAAPIGWLDLQGNCEFIVGIRSALIKENYARLYAGAGIVTGSKPEQELTEIKLKFQALLQALI

SEQ ID NO: 93764 - protein, 477 aa, unidentified
  source 1..477: note = Cyanobacterium sp.
  REGION 1..477: note = tr|A0A2K8WSP2|A0A2K8WSP2_9CHRO Menaquinone-specific isochorismate synthase MenF OS=Cyanobacterium sp. HL-69; OX = 2054282 GN=menF PE=4 SV=1
MPVIPDNHFLTDYSQKLKELIFLSHPVTDNDAQIVSISQEISPMDLLVFLAMLKPENQVSFYCENQRKQEAVVAIGAIKSLEVKNEGGEVNGGYNRFEQCQNFIEDSKGKIIFEDNLDSQKIPYFFSSFNFLEHSSDSYQAFPQAKIFIPYIQLVKKANSYLVIVNTFYQKNAPELNLIKQYLKQDFSQNILHYYHRVHHSQCTPCRYTLEKSDYHNFTDKVNHSLKAIASEKLTKIVVAHALEIKLEDNFNITKSLTNLRDNHPDCYIFCVGNEKEEFFLGASPERLLSIQDRQLVTDALAGSAPRGKSDYDDSLLGENLLHSEKEKREHQFVSDYIFEKLSIMGLSPKRASLQLLKLSNIQHLWTPIYAEIIEERNPLEIIAQLHPTPAVAGVPIDIACAEIENYENFDRSLYAAPIGWLDTNGNCEFIVGIRSALIQGNRARLYAGAGIVAGSKPEQELTEIELKFQALLQALV

SEQ ID NO: 93765 - protein, 402 aa, unidentified
  source 1..402: note = Cyclobacterium qasimii
  REGION 1..402: note = tr|S7V7Q4|S7V7Q4_9BACT Isochorismate synthase; OS = Cyclobacterium qasimii M12-11B OX=641524 GN=ADICYQ_4732; PE = 4 SV=1
MEATNTLINASKELVISSLLVNALRNNAAIAIWRKPGSSTVEAITDKDQEGYIGQLKDLDRLPPGFMIHPFISSQLHPPLYIKATNYFSFNLNEEATDASQIGELPYIGEGKAAELAVEIRKFIHNSQPKATVTTTTKSNFIETVNKAIEAINSGELFKVVPAKVKSIELPNNFDLASVFLNLCKAYPNAFINCFYSEKTGLWIGASPETLIKTKGDKFFTMALAGTQKAKGENPLKNAAWTQKEIEEQALVSRYIVDCFKKIRLREYSEIGPKTTVAGDLLHLKSEFLVDMKSTNFPQLGSVMLELLHPTSAICGMPKEKAMEFLHSEETFDRSYFAGFIGPVNMNEETSLYVNLRCAKLDNKETLLFAGAGITEDSVPEKEWEETELKCNIIGQFIQPKK

SEQ ID NO: 93766 - protein, 471 aa, Cylindrospermum stagnale
  REGION 1..471: note = tr|K9X5L6|K9X5L6_9NOST Isochorismate synthase family protein OS=Cylindrospermum stagnale PCC 7417 OX=56107; GN = Cylst_5779 PE=4 SV=1
MTVSQCRSNFFVDHKDLYQFLSAVQENCLQHNCQQIVSISLEINLVDPLVVLEKLAQANEINFYFENKGKGEAIAAIDAVAKLHGDGSERFTQTEDFIKTCLKNIINFGNANLPFAGPHFFCYFSFFHQNQQADYPFPSATIFLPRWQIAVKNQRCILVANTIINASANITKILQNLETKIELINSLENSFSNIDYLPGQFHKKSVTNAARFKRSVVSALEQIRSSHLSKIVLADALDVKSNKHFNLGKSLNNLRQLYPNCYVFSTSNGRGQNFIGASPERLISIHKQQLITDALAGSAPRGKTPAEDADIANSLVNSTKERHEHKLVIDFITQRLSQLGLLPQVLAPRLRQLSNIQHLWTPISAVVPANVHPLKIVAQLHPTPAVAGAARDVACAEIRRYESFERGLYAAPLGWVDAEGNCEFIVGIRSALINGDRARLYAGAGIVAGSDPEKEFAEVQLKLQALLKALV

SEQ ID NO: 93767 - protein, 405 aa, Cytophaga hutchinsonii
  REGION 1..405: note = tr|Q11U89|Q11U89_CYTH3 Isochorismate synthase; OS = Cytophaga hutchinsonii (strain ATCC 33406 / NCIMB 9469); OX = 269798 GN=entC PE=4 SV=1
MNSSTIVQTDISSTLCKQDLIKGSLYSALRHSYAIACWSNPESKNWDILIDPQPTLLAENKTPYLHKLPSGFLIAPFKSNAAKYFIQNKIHIQLGDTVNCSAQAGHESTLEDVLQTSRLAKDTSLSLADLLPEKEFLTQSADQDYINGVEAAKEIIVNSELQKVVLARSKDKQVNLANLETVVLNLREHYPLAYIGIFFHPETGLWISATPELLLCTDRNGTFKTVALAGTQKYNPEIPIRDVSWTHKEIEEQALVCRYIINCFKTIRLREYVEQGPRTIQSGSLLHLKTEYTANTSEVNMQELGTTMLQLLHPTSAVCGMPKKPAIDFIERHEQFDRKLFSGYSGPVNMEKETALYVTLRCAQVHANSITLYAGAGITADSVPQKEFEETNLKMNVIGNAFSNL

SEQ ID NO: 93768 - protein, 386 aa, Cytophaga sp.
  REGION 1..386: note = tr|A0A4R4KDS7|A0A4R4KDS7_9BACT Isochorismate synthase OS=Cytophaga sp. DMA-K-7a OX=2070510; GN = EZE20_13330 PE=4 SV=1
MGYPAAVWRMPHAQELNLLISIQDGIRQQIADLENLPACFVIHPFESPSSGESYILEGDVLITFSEDMQLLRLTNRLGEEQPAVQQLFDRAKQLSAQDEVKPVVWNGLSRRSETDPASRAHYTQAVEKAVEEIRAGNFMKLVLSRTKPGHYSKDFRPFQAFLRLCSAYASAFVSLVNLPDRGEQWMGATPETLVSVSADGIFKTTSLAGTQSIKNAEGDLIPPKKVLWGQKEIEEQALVSRYIIECFKKIRLREYLETGPKTIRAGNLYHLRTDFEVQMKEVNFAELGTVMLKLLHPTSAVCGMPRESARTFIKNIEGFDRSFYSGFLGPVQMAGESALFVNLRCVRLSEGTATFFAGAGITEDSDPMREWEETEMKCETLLSVLT

SEQ ID NO: 93769 - protein, 453 aa, Dechloromonas sp.
  REGION 1..453: note = tr|A0A5C7ZYK5|A0A5C7ZYK5_9RHOO Isochorismate synthase OS=Dechloromonas sp. OX=1917218 GN=E6Q42_02310; PE = 4 SV=1
MGERGAAMTTLLARLHHPDTAAAFAAKALGLPATTLVSLTLPLPAQPQDWLNRLPAEGPWWYHARPARGEYLLGIGHACHWTSSGPQRLTALDHAFAGARRHWPGSEMARAFCGFAFAPESADSPFPNAVLAIPALLLRHEAGRSHAVLTAPAGALAVTLRELDTALARHQATRLDGVLTPVDTTLADQAWLARVGAALRDIDAGRLAKVVLGRRRRLRCTQTLPAAAVLSRLVAQQADSIVYGHGHGSLAFVGATPERLVRLHGQQASADALAGTAWPGSQSLDDGKNRHEQSLVVDAVIAALTAHGTAPPRQAATCARSAGRLSHLRNKITVEVAHGCSLFDLIASLHPTPAVGGWPNAAARNWLAAHGEVRTAWYSGGFGWLDSAGNGDIAVALRSALIDGERIELQAGAGIVAGSQPPTELAETEAKFGTLLDALLDRGADTRATGTES

SEQ ID NO: 93770 - protein, 387 aa, Dehalobacter sp.
  REGION 1..387: note = tr|K4L3S9|K4L3S9_9FIRM Menaquinone-specific isochorismate synthase OS=Dehalobacter sp. CF OX=1131462; GN = DCF50_p1094 PE=4 SV=1
MKYLKKEMKLENPLAFWTHFDKQDRLFFYNPLTGELIIGAIRWRTFAEGESYQNYDLVFSARTFFQSVRDPKWAGLGNETIAFKYYYVEKDGKQLLYYPEQAPKEEICGLEDRETKSVRHTYTIADDDYPQWQELFTNVKQEISLKNVDKVVISREVKISCATTVHVESVLKSLREKNPDSFVFAYAKEGRTFLGATPEILVQKADDEIISYALAGTIPRNAIDEGTQMEILLNDPKNLHEHRIVRDTIADVMKKYCAEVWIDETRILTLKNLYHLKTRLGAKDRSLLTDWVTRLHPTPALGGNPVGPALDIIAREEKHERGMYAAPLGIMDQNGNGIFVAGIRSALIQDNMVYAYTGCGIVEGSDCLEEYIETNDKLRTILEGLVP

SEQ ID NO: 93771 - protein, 484 aa, unidentified
  source 1..484: note = Dehalococcoidia bacterium
  REGION 1..484: note = tr|A0A521KRR8|A0A521KRR8_9CHLR Isochorismate synthase OS=Dehalococcoidia bacterium OX=2026734; GN = EPO65_00060 PE=4 SV=1
MARSPSPPILDTDIRGRSGTPPSRHHSDTPAPTEALRTVASVTAQSGSELASRIVEARRSAAPGSFISVTLPAGFDPRSLLNDPQRNNVAASYERPSRGLALVGVGVAGRVDVPSGAHPASVREQARALLHGPVGGDAPLLAPRLLGGFRFNPAGKVGDPWRDFGAGWLVLPQLMFVLSGESNAVVVAPGVDPGAAEAVVDEAPAEEPSATTLHVERPMDREAWLTSVAAIASEVRAGAYEKAVLASTQQLASDAPISIGRALSRLRAGYPDCHLFTMTEGGTTFLGASPELLVSLLDGRVRALGLAGSAPRGETPEDDARIGEALLVSAKDRMEHEAVVRAIRERLGSLTEDLVAPNQPELRRLRNIQHLATEISARVRPGTGLLDLVQRLHPTPAVCGWPADRARAVIEAHEAFDRGWYAGPVGWMDAAGDGEFAVALRSAVVSGNRAWLFAGNGIMGDSNPASELAEVQWKFRPLSEALGA

SEQ ID NO: 93772 - protein, 397 aa, Deinococcus maricopensis
  REGION 1..397: note = tr|E8U3H4|E8U3H4_DEIML Isochorismate synthase; OS = Deinococcus maricopensis (strain DSM 21211 / LMG 22137 / NRRL B-23946 / LB-34) OX=709986 GN=Deima_0181 PE=4 SV=1
MPVSLTADVPAGTPDTPSSATHLLHAYNDHASFFYASPTRTLLGQGALDQRAVPTPELTAHATDLLRPRPGQTRPLLVGAVPFHAEQPALLLRAQRTQQAGRLPALPHPGTPAPRTARLQPTPTPDAYEAQVQAARRACQDGTLRKVVLARTLHVTLDDVIDRAAVLRHLAQRNPDGYTFALRTGPDTHLLGASPELLLTRHGQQVHLHPMAGTCARAHDPAEDAERAHALARSAKDLHEHALVVDAIRSALTPLCAELHVPEQPRVVPTATLWHLATRITGTLRDPRTSALDLVRRLHPTPAVCGVPHDAARAFIRRTEPFERDLFTGAVGWMDADGDGEWAVTIRCADVRGREARLYAGAGIVGASDPAAERRETAAKFRTMLHALGVHADGEAL

SEQ ID NO: 93773 - protein, 378 aa, Deinococcus sp.
  REGION 1..378: note = tr|A0A418RCU5|A0A418RCU5_9DEIO Isochorismate synthase OS=Deinococcus sp. RM OX=2316359 GN=D3W47_03430; PE = 4 SV=1
MTQTATLPATQPLPHAATHAPAWRAPDRHLHLLDPHAAPLTAAQARHALSGAPDGTHLLGAIGFTPRDPAAFHLAHSTPPTSTATLSTAASTGTTVLHAASRPAPDAFEANVAHAAAAIARGELHKVVLGRTLDLHLHAAPDPRAVTARLAQDAPDAFVFCVPLGDGAQLVGASPERLLSKRGAQLRLRPLAGTRARHADPAEDLRRAHDLLHSAKDRHEHALMIAAIRETLAPLCRELTVPDAPRLVQTPGLWHLGTSIHATLRDPGLHVLDLVSAVHPTPAVCGVPAPAARDLIGTLEGPRGFFAGAVGWCDARGDGEWAVTIRCARLRSPHARLFAGAGIVAGSDPARERAETAAKFGTMLRALGVSPLDLEGVL

SEQ ID NO: 93774 - protein, 485 aa, unidentified
  source 1..485: note = Deltaproteobacteria bacterium
  REGION 1..485: note = tr|A0A4Q3L4P8|A0A4Q3L4P8_9DELT Isochorismate synthase OS=Deltaproteobacteria bacterium OX=2026735; GN = EOO40_03055 PE=4 SV=1
MSDVDKQMRRAWQRSQAIGRPVLLRLHHKLAACEDPWVLWWQAQHRAAQPMPFAVFHAAERQFSAAAWGAVQRLKLPPERRFAAARQICASLFEQAMDVRADGDGTVDIDAPLAFLSLALDATPPRAQWGGWGGGQLFVPQVVVYKNAAGTAAVVVQPVDGRQPQEACVAHASGAAQRTLESLRRAAVEARPPAKLCPQASPRARALQSRAQWDTQVDRARQATRGPGLQKVVLARATRCRVPPGQAFCVASTLWRLRAHHPQSITFGMAGPDNTTFVGATPEVLVEVCGRRLRTQAVAGTAPRGNDARSDESFGVALMRSAKDRHEHEVVAAALQATLGSLCLELRREAQPQLVRLPRLQHLNTPFEGQLRQAGGVLELIERLHPTPAVGGFPQQDACSFLRRHEQLERGGYAAPLGFFTAASDGLFAVALRSMLLHGSVGYGFAGAGIVAASEPAAEWRETRLKLQTMQDALCMHSASQCVLA

SEQ ID NO: 93775 - protein, 428 aa, unidentified
  source 1..428: note = Dermacoccaceae bacterium
  REGION 1..428: note = tr|A0A563E4Z0|A0A563E4Z0_9MICO Isochorismate synthase OS=Dermacoccaceae bacterium C5-26 OX=1660198; GN = FGL98_05970 PE=4 SV=1
MTLPLVDDAPGTPSLVARTTAIPDPGDLAALVPADVPARDVVSWLRDGDGLIGWGRAASVRTTGEDRFEDAEAWWRQVSAQAVCRTDVDVPGSGPIAFGSFAFSPHSDAGAALVIPAVVVGRRDGVSWVTHISPAGRLSPAPRIVPTPAASAPGELAYSDGALTGPQWTTAIARTVELIQAGDVDKVVMARDVQVEAAAPIGPQWLVQRLSEQYANTWTFSVDGLIGATPEMLVRREKGLVMSRILAGTIQRTGNDERDLALAGSLARSSKDLEEHEYAVRSVADALRPHCTSMNVPESPFVLHLPNVMHLATDVAGVLDDRASSLKLAAALHPSAAVCGTPTAAAAAVIEELEHMDRGRYAGPVGWMDTAGDGEWGIALRCGALDPHDTRHITIFAGCGVVAGSEPDAELAESEAKLLPMRDALTSD

SEQ ID NO: 93776 - protein, 428 aa, Dermacoccus nishinomiyaensis
  REGION 1..428: note = tr|A0A4U0RL33|A0A4U0RL33_9MICO Isochorismate synthase OS=Dermacoccus nishinomiyaensis OX=1274; GN = FA951_08465 PE=4 SV=1
MSLSPSPADAARTPHLRVRTQELADPGDLVSLVPAGRPAEDVMSWVRRGEGLVAWGRAASIATSGDERFADAESWWDALVAAADVEDEVALPGSGLVAFGSFSFRNSSDEGSALVVPEMVVGRRGGRAWLTTINRTSDRLPDVTPALAPTGVEARDGALTPAQWRSAVSDAIEMIRTGRIEKVVLARDEIHVADADIDPRWLLTRLAARYRDTWAFAVDGLVGATPELLVRSEKGLVTSRVLAGTIRRAGAGASSEEQDLALAASLARSSKDLEEHEYAVRSVEAALRPHCSSMNVPDAPFVLNLPNVLHLATDVSGALAGGASSLTLAASLHPSAAVCGTPTNEAALVIDELEHMDRGRYAGPVGWIDAAGDGEWGIALRSGQIDIENPCRIRLFAGCGIVAGSDPVSEVAESVAKLSPMREALRDD

SEQ ID NO: 93777 - protein, 438 aa, Dermacoccus sp.
  REGION 1..438: note = tr|A0A4Q4BYA1|A0A4Q4BYA1_9MICO Isochorismate synthase OS=Dermacoccus sp. 147Ba OX=2510111; GN = EVU97_05650 PE=4 SV=1
MPAFSHPSPPGPKRALGWSIVNEARPAATPRLRVRTYELTDPGDLVGLIPAGRPAEDVMSWVRREEGLVGWGRAAAVSTSGDARFADAEEWWDALVAAADVVDEVERPGTGLVGFGSFSFRNSSDEGAALVVPEMIVGRRDGHAWLTTINRTTDQLPEVKPAEAPTGVERTDGALSPAQWRGAVGDAIEYIRAGRIDKVVLARDEIHTADADIDPRWLLARLSTAYRDTWAFAVDGLVGGTPELLVRSDKGLVTSRVLAGTIRRTGSDDHDLALAASLARSSKDLVEHEFAVRSVEAALRPHCSSMNVPDAPFVLHLPNVMHLATDVSGALTDGASSLTLAASLHPSAAVCGTPTREAALVIDELEHMDRGRYAGPVGWIDARGDGEWGIALRSGQIDIENPCRIRLFAGCGIVEGSDPVSEVAESVAKLAPMREALR

SEQ ID NO: 93778 - protein, 440 aa, Dermatophilus congolensis
  REGION 1..440: note = tr|A0A239VRG2|A0A239VRG2_9MICO Isochorismate synthase dhbC OS=Dermatophilus congolensis OX=1863 GN=dhbC; PE = 4 SV=1
MTTPNVSSPHVTHTVNQAPAPRLYATTTALPPTDGPTHLHNALRDADPRTTLAWIRDGNGLIAHGRATTITTHGHSRFTDANTWWQTITNNATIDNDIQAPGTGLIAFGSFAYSPHSPHGATLIVPEHITGTHNGISWHTTITTTPTTPTPPPPAPPITEPGPATYTPGTLTETTWTDRVTQAIDAITNGHLDKVVLARDEHITTPHPIDPRWLLTQLTNSYPHTWVFAIDGLIGATPEMLIRLHNNTATSRILAGTIRRTGNTTTDTNLASTLTHSPKDLHEHAYAVTSVTDVLQPHCHTLSVPETPFVLDLPNVMHLATDVTGHTNTNINVLELAEQLHPSAAVCGTPRTTADNLINTLEGMDRGRYAGPIGWIDSHGDGEFGIALRCGHLDATHTNMRIFAGCGIVDASDPTAELNESHAKLLPMKNAFTPPQDAHP

SEQ ID NO: 93779 - protein, 474 aa, Desmospora sp.
  REGION 1..474: note = tr|F5SKV5|F5SKV5_9BACL Isochorismate synthase MenF; OS = Desmospora sp. 8437 OX=997346 GN=menF PE=3 SV=1
MGGRTVTTMRELHNLAGLKEGAARARREQRPVLVSRTRLVNSLDPLSFFASATGYRGTRNFWSDPDREVTLVGVGAAWKLETHTREDSYLKTGQEWDHLLKGAIRVPAEAPTGTGPLLLGGFSFDPLAGKTPLWEGFFDASFILPQFLLTVTGGESWLTVNVLLQPGEDVEQRGKVLAEQEDELLEGAEDFHLSPPARTSFDVVEVEPDRWKKTVATAAREIREGALEKVVLARQLRLQSETSFSPEAGLYRLRERQPHSFLFAVERGEACFLGASPERLVKREGERLYSTCLAGTIRRGEDPEEDRKLGEELLSDPKNEGEHAVVVHMIREAFQQGCSQVRVPDSPTLYRVRDVQHLFTPVEGTPLPETTLLSMVQQLHPTPALGGFPQKEALARIRETEGMDRGWYSAPVGWLDYRGDGEFAVAIRSGLIRGREASLFAGCGIVGDSEPDSEYEETKLKFKPMLSALGGDGR

SEQ ID NO: 93780 - protein, 383 aa, Desulfitobacterium dehalogenans
  REGION 1..383: note = tr|I4A8R3|I4A8R3_DESDJ Isochorismate synthase family protein OS=Desulfitobacterium dehalogenans (strain ATCC 51507 / DSM 9161 / JW/IU-DC1) OX=756499 GN=Desde_1960 PE =4 SV=1
MRYQEKRINLKEPLAFWRNFEDEEKMLFYHPFKKELIIGTIPLKKFYGEENFRGYPYVFSRKTFFPTLKGPQWDGFEDETTAFEFYLVEKEGEQKLYYRDQEIEIQDQECIPRRHDYKLTAKDYGEWQGLFNQAKEEIRSKKVDKVVISRQVEIQCRTAVAIESVLKNLMENNPGSFVFAWYKQGKTFLGASPEVLVEKNKGTISSYALAGTGARNQQEADDIQQAALLNDPKNRHEHQLVVDYIAEIMESHSDEVVIGETTTLALKNLFHLKTPIQGKVKENSSLRDWVSRLHPTPALGGYPAEKALEIIARYENHERGLYGAPLGVMNEEGDGIFVVGIRSALIEGNKLYAYTGCGIVADSECEAEYLETANKARTILESL

SEQ ID NO: 93781 - protein, 463 aa, Desulfitobacterium hafniense
  REGION 1..463: note = tr|A0A098B3I4|A0A098B3I4_DESHA Isochorismate synthase/isochorismate-pyruvate lyase MbtI; OS = Desulfitobacterium hafniense OX=49338 GN=DPCES_3040; PE = 4 SV=1
MLFQFEERVDFCQWMEREEHLMKKYYEKNISMESSKAIYEIAGRLCGGEKENVYLYENKDCVSVGVGRYCEIIVTPEEMVMEKEGVRQSIKVSDLCRDLDKLFKSVAVDSWRAYGIANFGLARYLYDLNMGGETEELFHFIIPDKEYRVHQDRILLRALNQEAIERMEKNIVNALQNRAGENNAILYDGQEILIFDQEYYKEIVELGVKEIRNKKYQKVILSRKIPVHHRLDMLQTYLQGRRGNTPARSYYYRFPDLEVAGFSPETIAEVDDAGTVYTFPLAGTRALLHDSETNNYLKEELLHDAKEVAEHAMSVKLADAELEQVCEAGSVAVIEFMSVIERGTVQHLGSRLRGKLRAEYNSWHAFCSLFPAVTASGIPKKEAIEAIGRMEKDARNLYSGGVLTYDNNGTLDAALVLRSIVQDSEETWVRVGAGIVEMSHPARELTETQEKVGSVAGQLVKEG

SEQ ID NO: 93782 - protein, 469 aa, unidentified
  source 1..469: note = Desulfobacterales bacterium
  REGION 1..469: note = tr|A0A1E7J5X5|A0A1E7J5X5_9DELT Isochorismate synthase MenF OS=Desulfobacterales bacterium C00003060; OX = 1869303 GN=menF PE=3 SV=1
MSVVKYSSKIIESKDVRNQVNRFLPRIKGMIQSGKPLPLLVTCRTVPVDILRWLKSHSLYPRLYWYDREGSMEIGGYGSLMTVSEDDPSRFLTAFGKLSAMLDKHPQKDFLRFLGGMSFSPQEKQDNRWEDFPGFWFVLPEVMMLRINEDYFVSAGVLLEGHEDVNETFTSILESLKKTQAENPSPTPDQFPAIITRTDHPDYTGWTNNVDTSLHEISEGKIDKVVLARRTDLLFEKPVDAVDYLHALKDANDRCYCFLLQPRQDTAFLGATPERLFKTEKNLLVSEAACSTVVRGADPDEDQRRSAWLLQNRKELSEHGFVTGDLLEKFQQITKNACLSGQPKILQLANVQHLVSNISGVLENGISIGEIVSIMHPTAAVGGYPGPAATSLIKRLEPFGRGWYAGPVGIISHESAEMAVGIRSSLVTDRVISLFTGAGIVQGSTPESEWQEIEDKMSTAFKVLSGGLE

SEQ ID NO: 93783 - protein, 464 aa, Desulfonispora thiosulfatigenes
  REGION 1..464: note = tr|A0A1W1UV52|A0A1W1UV52_DESTI Isochorismate synthase MenF OS=Desulfonispora thiosulfatigenes DSM 11270; OX = 656914 GN=menF PE=3 SV=1
MKAENKELYDLIQMAINRAKDRKTNILLSYVQEIDEINPLTFFTLGSLFKGTRFLWSEPSRNQYLVGLGHAYTISNDFSQQRFWAVQYEWQRLVDNQISNIELKPSSGIGPILFGGFSFDPDKDKTDLWKNYQEAKMVVPSYMLTINKGKTFLTFNVLIHANDRLEEVIKDMKEKEKIIFQRKTIQDNNENIVINKENINVESWLNSVAGVVSEIKQGYVNKVVLARELRLQMREKIEVATVLERLLDEQPKSYIFALECEEDCFIGASPELLVKKEKNEFKSMCLAGTIGRGKTPAEDEKLGNELLNDHKNLYEHALVVEMIKNAMEKGCEEVEIAKSPSLYDLKNVKHLHTPVKGLAKEGVTILDMVERLHPTPALGGYPKEISMNIIRKKEVLDRGWYAGPIGWLDSKCDGEFAVAIRSSLIKGNIVSLFAGGGIVERSNPAQEYQETEMKFKPMLSALRG

SEQ ID NO: 93784 - protein, 503 aa, Desulfovibrio sp.
  REGION 1..503: note = tr|A0A3P1ZVA6|A0A3P1ZVA6_9DELT Isochorismate synthase OS=Desulfovibrio sp. OH1186_COT-070 OX=2491045; GN = EII23_06065 PE=4 SV=1
MGFLKTSLKHYSSRSPVGTLRRRLGTGGKYAVRSGTTVMVEALQRPLRSAIRNACQNASQQRQPALAITAASVPRMNLLSAFARYSPHMNANLWFGLTKKSILGLGAAIECTGHGADRFTDVSARWHDLIKNAVTEGDTAPVALGGFRFDTACPASPMWAGFADGALVIPRVTILQNGAEYCRIVAADYAPPGADADARIRNICSGFNIGENERNMPPPEQEGHISIFDSGNARKQWQNLVHNALDAISRGLAKKIVAARMIRATSTTPFAVPNIVKRLHAKNPQATVFAFGRCGTYFVGATPEILITAKERSFQTMALAGSAPRSGDPARDAELGQALLVSDKDRIEHDFVVQAVLRSLQPHCETLVADSAPSLHKLHKVQHLITHFKGNLSSGQNLLDIVAHLHPTPAVGGAPTEFALAFLREYEGIDRGWYAGPVGWLDAENNGEFMVALRSGVICGENAALFAGCGLVANSDPDMEYQETRFKFSTMLDGLCLTHGDGE

SEQ ID NO: 93785 - protein, 462 aa, unidentified
  source 1..462: note = Dickeya aquatica
  REGION 1..462: note = tr|A0A375ACV6|A0A375ACV6_9GAMM Isochorismate synthase MenF OS=Dickeya aquatica OX=1401087 GN=menF PE=3; SV = 1
MAFFFQGVTRIIPYFQLGYGVNVLQFSDLLHQMHQALSEPLPAQTGFHAITLTLTLHDSGQLLAWLASQPVYPQFYWQHRQDDEEAAVCGDVCAFGDITQANAFLQRDDVDDSVRIWGVNAFDQHPIEPDAEVARLFVPRIALLRQARRLRVRVNLFSETSLAEDARQAQAFLRQLQPPQALAVLQARILSARHCPGLEQWRGLLNLALAEIAAGKLEKVVPARATMLSLNEPLRAATLMAASRAVNHHCYHFMLASAPEQAFLGSSPERLYRRRNNRLETEALAGTVANDSDEVTAAQLANWLINDVKNQCENMLVVDDICQRLHQVALTLDVMPPEIIRLRKVQHLRRTIQATLRATSDEACLRLLQPTAAVAGLPRRPARDFLARHEPFTRGWYAGSAGYLSCQQAEFCVALRSANVNARQLTLYAGAGIIAGSDPELEWQELENKAAGLKSLFESDEL

SEQ ID NO: 93786 - protein, 441 aa, Dickeya chrysanthemi
  REGION 1..441: note = tr|C6CQP3|C6CQP3_DICC1 Isochorismate synthase MenF; OS = Dickeya chrysanthemi (strain Ech1591) OX=561229 GN=menF; PE = 3 SV=1
MNVQPFSDLLRRMHQALDEPLPEQAGFHAITLTLPLQDSSQLLAWLAAQPLYPQFYWQHRQDDEEAAVCGQVRVFEDITYAEAFLQRHDVDDSVRLWGLNAFEQRPAEENSAAFLFLPRIALLRQGQRLRLRINLFSDDSLRDDARDAQDFLRQLLPLQPLSTLHARIEDTHHCPDRRQWIALLHQALADIAAGQMEKVVPARATVLSLNQPLRATTLMAASRAANYRCYHFMLAFAPHQAFLGSSPERLYRRRHTRLETEALAGTVASDHNDEKAAELASWLMNDVKNQCENMLVVDDICQRLHQVALTLDVMPPEIIRLRKVQHLRRTIQATLRGSTDSECLHLLQPTAAVAGFPRAAARAFLSRHEPFRRGWYAGSAGYLSRQQSEFSVALRSASVDGKQLTLYAGAGIVAGSDPEQEWLELENKAAGLKSLLEDDIS

SEQ ID NO: 93787 - protein, 395 aa, Dickeya dadantii
  REGION 1..395: note = tr|E0SLE3|E0SLE3_DICD3 Isochorismate hydroxymutase 2, chrysobactin biosynthesis OS=Dickeya dadantii (strain 3937) OX=198628 GN=cbsC PE=4 SV=1
MSTLAATSSSLDARTLQHDDFLFLSPDNSLHARGCYAALPAAVADGGHLQGDVQQQVKALFARARQDGIARPLLVGAIPFDKRQPARLFVPQQSRWFARDTLQHEPLPATPLAVRQIREIPEHDAFCQMVSAGVAATRSGELNKIVLSRLLDIDTDQPLDSIRLLLQLNQQNPWSYNFHVPLEQGALLGASPELLLHKQGNQIVSQPLAGSARRSDDPVEDQRLRRTLMASAKDRHEHRLVTDDIQRVLAPRCRTLTIPDTPELLSTPVLWHLATRVQGEVLDTQENALSIACLLHPTPALCGVPFEAARDRIAQLEPFSRGLFGGIVGWCDDEGNGQWVVTIRCGEVRQNRVRLFAGAGIVPDSQPVSEWHETGVKLSTMLRAFGLRQDQECAA

SEQ ID NO: 93788 - protein, 442 aa, Dickeya dianthicola
  REGION 1..442: note = tr|A0A385XY83|A0A385XY83_9GAMM Isochorismate synthase MenF OS=Dickeya dianthicola OX=204039 GN=menF; PE = 3 SV=1
MNVQQFSDLLRQMHQALNEPLPEQAGFHAITLTLSLQDSSPLLAWLASQPVYPQFYWQHRQEDEEAAVCGQVRVFDDIAHAEDFLQRHDVDDSVRLWGLNAFEQHPVVKTNAAAFLFLPRIALLRQGARLRLRVNLCSETSLRDDARDAQDFLHRLLPPQPLPTLHTRIEAIRHCPDRRQWIELLHLALADIAAGQMEKVVPARATALSLDRPLRATTLMAASRAANYRCYHFMLAFAPHQAFLGSSPERLYRRRHTRLETEALAGTVASDHDDEKAAALADWLMNDVKNQCENMLVVDDICQRLHQAALTLDVMPPEIVRLRKVQHLRRTIQATLRSGTDSECLHLLQPTAAVAGLPRAAARAFLAQHEPFHRGWYAGSAGYLSRQQSEFSVALRSASVAEQQLTLYAGAGIVAGSDPEQEWQELENKAAGLKSLLEDAIS

SEQ ID NO: 93789 - protein, 442 aa, unidentified
  source 1..442: note = Dickeya fangzhongdai
  REGION 1..442: note = tr|A0A2K8QJH1|A0A2K8QJH1_9GAMM Isochorismate synthase MenF OS=Dickeya fangzhongdai OX=1778540 GN=menF; PE = 3 SV=1
MNVQQFSDLLRQMHQALNEPLPGQAGFHAVTLTMSLQDGSPLLAWLASQPVYPQFYWQHRQDDEEAAVCGQVRVFDDIAHAEDFLQRHDVDDSVRLWGLNAFEQHPVAEANAAAFLFLPRIALLRQGLRLRLRVNLCSETSLRDDARDAQDFLRRLLPPQPLPTLHTRIEATRHCPDRQQWIDLLHLALADIAAGQMEKVVPARASMLSLDRPLRATTLMAASRAANYRCYHFMLAFAPHQAFLGSSPERLYRRRHTRLETEALAGTVASDHDDEKAAALADWLMNDVKNQCENMLVVDDICQRLHQAALTLDVMPPEIVRLRKVQHLRRTIQATLRSGTDSECLHLLQPTAAVAGLPRAAARAFLARHEPFHRGWYAGSAGYLSRQQSEFSVALRSASVADRQLTLYAGAGIVAGSDPEQEWQELENKAAGLKSLLEDAIS

SEQ ID NO: 93790 - protein, 440 aa, Dickeya paradisiaca
  REGION 1..440: note = tr|C6CBR4|C6CBR4_DICP7 Isochorismate synthase MenF; OS = Dickeya paradisiaca (strain Ech703) OX=579405 GN=menF; PE = 3 SV=1
MQQLTDLLGQIQKALDKPLPNRPGFHAVTLSVTLADAGLLLAWLAAQPAYPQFYWQHRQDDEEAAVCGQVCDFDTMAEAERFLQRYNTDNSVRIWGLNAFAKQVVAGKARTSFLFLPRVALLRQGDRLRVRVNLFSARSLSDDALQAQAFIGGLRPLAPLPQLQNRILGIRHCPTRQQWIALLHLALAEIQRGNLEKVVPARATTLSLDTPLRATTLMAASRAVNHHCYHFMLAFAPFQAFMGSSPERLYRRRLQALETEALAGTVAGHPDDARAAELADWLMNDRKNQCENMLVVDDICQRLHQAAQSLDVMPPEVVRLRRVQHLRRTIQATLRQASDSECQSLLQPTAAVAGLPRAAAREFLARHEPFQRGWYAGSAGYLSRQQAEFSVALRSANVMDNDLTLYAGAGIVAGSDPEQEWQELENKAAGLRSLLDDDIA

SEQ ID NO: 93791 - protein, 440 aa, unidentified
  source 1..440: note = Dickeya solani
  REGION 1..440: note = tr|A0A2K8W3N8|A0A2K8W3N8_9GAMM Isochorismate synthase MenF OS=Dickeya solani RNS 08.23.3.1.A OX=1240086; GN = menF PE=3 SV=1
MQQFSDLLRQMHQALNEPLPEQAGFHAVTLTMSLQDSSPLLAWLASQPVYPQFYWQHRQDDEEAAVCGQVRVFGDIAHAEDFLQRHDVDDSVRLWGLNAFEQHPVAETHPAAFLFLPRLALLRQGAFLRLRVNLCSETSLRDDARDAQDFLRRLLPPQPLPALHTRIDATCHCPDRQQWGALLRLALADIAAGQMEKVVPARASVLSLDRPLRATTLMAASRAANYRCYHFMLAFAPHQAFLGSSPERLYRRRHTRLETEALAGTVASDRDDNKAAVLADWLMNDVKNQCENMLVVDDICQRLHQAALTLDVMPPEIVRLRKVQHLRRTIQATLRSGTDSECLHLLQPTAAVAGLPRAAARAFLARHEPFHRGWYAGSAGYLSRQQSEFSVALRSASVADRQLTLYAGAGIVAGSDPEQEWQELENKAAGLRSLLEDAIS

SEQ ID NO: 93792 - protein, 395 aa, Dickeya sp.
  REGION 1..395: note = tr|A0A5B8I2B4|A0A5B8I2B4_9GAMM Isochorismate synthase OS=Dickeya sp. NCPPB 569 OX=568768; GN = Dpoa569_001067 PE=4 SV=1
MSTLAATSSSLDVRTLQHDDFLFLSPDNSLHTRGCYAALSMPVADGGHLQGSVQQQVNALFARARQDGIARPLLVGAIPFDKRQPARLFVPQQSHWFARDTLPPDTQPATPIRARRIREVPGHDAFCQMVSAGVAATRNGELNKIVLSRLLDIDTEQPLDSIRLLRQINQQNPWSYNFHVPLEQGALLGASPELLLHKQGSLIVSQPLAGSARRSDDPVEDQRLRRTLMASAKDRHEHRLVTDDIRRVLAPRCRTLTIPDTPELLSTPVLWHLATRIQGDVLDARENALSIACLLHPTPALCGVPFEAARDRIAQLEPFTRGLFGGIVGWCDDQGNGQWVVTIRCGEVQQNRVRLFAGAGIVPDSQPVSEWHETGVKLSTMLRAFGLRQDQECAA

SEQ ID NO: 93793 - protein, 441 aa, Dickeya zeae
  REGION 1..441: note = tr|A0A2K9QCF2|A0A2K9QCF2_9GAMM Isochorismate synthase MenF OS=Dickeya zeae OX=204042 GN=menF PE=3 SV=1
MNVLQFSDLLRQMHQALNEPLPEQAGFHAITLTMSLQDSSQLLAWLASQPVYPQFYWQHRQDDEEAAVCGQVRVFEDIAHAEAFLQRHDVDDSVRLWGLNAFEQRPSGANTSSFLFLPRIALLRQGRRLRLRVNLFSDISLRAEARDAQDFLRQLQAPQPLPQLHSRIEATQHCPDRQQWIALLHQALADIAAGKMEKVVPARATVLSLDKPLRATTFMAASRAVNHHCYHFMLAFAPHQAFLGSSPERLYRRRHTRLETEALAGTVASHQNDEKAAELADWLMNDVKNQCENMLVVDDICQRLHQVALTLDVMPPEIVRLRKVQHLRRTIQATLRSSRDSECLYLLQPTAAVAGLPRAVARTFLAQHEPFQRGWYAGSAGYLSRQQSEFSVALRSASVAESQLTLYAGAGIVAGSDPEQEWQELENKAAGLKSLLDEAIS

SEQ ID NO: 93794 - protein, 376 aa, Dietzia sp.
  REGION 1..376: note = tr|A0A5A9ZRG8|A0A5A9ZRG8_9ACTN Isochorismate synthase OS=Dietzia sp. ANT_WB102 OX=2597345; GN = FQ137_09755 PE=4 SV=1
MASGPHPDVARPVTAPDFLLSRPTGSLRTQGAVNSFRDPADAALALRSGASGLVVGAFGFEPDAPAALVEPDVVVRVDGPLEPPAYFRGMRTRARVVEEIPTAREHRTRVSTAIASVRSGGIDKVVLARAVRLASDEPIDPHAVCAALIDSSPAADGYLVDLSPAGGAHVGRVLVGSSPELLVRRRGDLVECHPLAGSAPRSTDPATDQAAARALRASGKDASEHAFVVESLARALGPLCTELEIPDQPTLTSTREMWHLGTRIRGRIADPRTTSLDLALAVHPTPAVCGTPTDEARRLIAAIEGNRGFYAGAVGWSDSSGDGDWMVTIRCAEIDADRYGAVAWAGGGLVADSEPDDEVAETGAKLRTVLRAFGAF

SEQ ID NO: 93795 - protein, 377 aa, Dorea formicigenerans
  REGION 1..377: note = tr|A0A564TWS3|A0A564TWS3_9FIRM Salicylate biosynthesis isochorismate synthase OS=Dorea formicigenerans OX=39486 GN=pchA PE=4 SV=1
MKYHTIKVEIKNVLLLWEQVKAQEKFFFYNPYEKKMILAWERNCRIEDCIDEKVPFFYTIRFNEEKVEKEWENYCTEKIVFNYILYSDKDGTFLIYRDKKPKLIESDHAIIRHIYNMEKGNYHSWEKLYTNIKNEIKEGKVKKVVASRKVVVHSTKKFDIVSIILNLLNSNKESFVFAYEKNKKTFLGASPEILVQKTESIIKSYAIAGTMPKKKHIERGKWLLDDLKNNEEHKIVVDYIAGIMKKNAEEIYISRTTLLELKNLYHLKTEVMAKNLNLSLVDWAKLLHPTPAMCGVPKEKAMGIINDYEEHDRGLFAAPIGVIDEKGDGVFIVGIRSALIEGNTLYAYAGCGIVEQSDCREEYEEINNKLRTILEAL

SEQ ID NO: 93796 - protein, 418 aa, Dyadobacter sp.
  REGION 1..418: note = tr|A0A4R5DPK1|A0A4R5DPK1_9BACT Isochorismate synthase OS=Dyadobacter sp. AR-3-6 OX=2541721; GN = E0F88_07960 PE=4 SV=1
MVSVQTGSKTSIFEGLKTENLWEASKTLGFPAALWRLPYTNEIKILISIQDAISKIQPDFEKLPCGFLMGSFDWQENEPVNFMEGDIIVTFGENNQAVQTSNRLGEEHPDVKRLVALSWEIQEKTVYRRAGEHALSGVLLTDERSKERFKRTVELAVAAISHNQFKKVVLSRTKEIQYNDDFQPAKAFSKLAKAYPHAFVSLVNLAEQNELWLGASPETLVEQKSNGTFKTMALAGTQKARNSEGDLIPKYDVRWGQKEIEEHALVSRYIVECFKKIRLREYSETGPKTVLAGNVYHLRTEFDVDTIALNFSELPTTMLKLLHPTSAICGEPKLPSLKFIQEVEGYDRSFYSGFLGPVQVEGESNIFVNLRTVRLKNGVATLFAGAGITEDSVPEQEWQETELKCDTLLKVIAEDFIN

SEQ ID NO: 93797 - protein, 372 aa, Dysgonomonas capnocytophagoides
  REGION 1..372: note = tr|A0A4Y8LEC6|A0A4Y8LEC6_9BACT Isochorismate synthase OS=Dysgonomonas capnocytophagoides OX=45254; GN = E2605_02080 PE=4 SV=1
MEFSKHTEYNILDSLIDNNIHFALYRLPKTNTINLIMQKSDITQTFSNLSELNGKNGFTIVPYQITGSTPVILIKPDVILNNEQNILDYIKKLDLHQKNGYRPASYPDKEDCNSFERYCKVYDLFQEELESGKCTKLVLSRTFDIDKGDRFSAGASFAKACSKYPNSFIYLCHTPISGTWLGCSPERLISGQDNQWITDALAGTQKAESDIASAVWDDKNKLEQQIVADYMHQQLQKAGITSSHNNVETIQAGNLLHLRSEFSFHLDNPSQIGHVLDLLHPSPAINGFPKEEAFNFILDNEGYNRSYYSGFIGNLNTEERTDLYVNLRCMQIFDNKLRLYAGGGILPSSDLFSEWKETENKLQTIISIIENI

SEQ ID NO: 93798 - protein, 400 aa, Echinicola sp.
  REGION 1..400: note = tr|A0A514CP10|A0A514CP10_9BACT Isochorismate synthase OS=Echinicola sp. LN3S3 OX=2591634 GN=FKX85_11075; PE = 4 SV=1
MNTPTADTHLITQEEVLDRWLCSALEGGFQIAIWRAPKSNSVQLILDQTKEIKRVNLELDILPQGFIAHPFADQEDQKAFFLEASDYFKFDIDTPMTEAEDELYKKAKRSPTEIKGQVNQLLRKAQPEKNSFQFSSTSKSSFIEFVEKGIKAIQDGKLSKVVPARIQKVHLKDNFDLTKTFLELCQRYPDAFVNFFHIPNVGTWLGATPEILIKTEGLYFHTMALAGTQKAEGEDPVRNAAWKQKEIEEQAMVSRYIVNNFKKIRLREYEENGPKTVKAGNLLHLRSDFRVNMEATNFPQLGSVMLKLLHPTSAVCGTPREDSMKFILEHESFDRCFFAGFIGPVNIENRTAIYVNLRTAQLINEDVLLYAGAGVTADSVPEKEWEETTLKCDIIGKFIQ

SEQ ID NO: 93799 - protein, 2626 aa, Ectocarpus siliculosus
  REGION 1..2626: note = tr|D8LMF2|D8LMF2_ECTSI Similar to Isochorismate Synthase OS=Ectocarpus siliculosus OX=2880 GN=ICS PE=3 SV=1
MEQQTKVHAVTAAAAAAAAQGSGRHGVVDLTPHSSAAVPATSATGQGGAAAAAPTGGGEANGAPENGIEKKAKPMTRKTPVPLWKARDILLQAVSDSGGESEFLQAHSALSSIYRGMGRERRSPPVSGDDVGDDVEHVFSIRLEVLVDTEELGQNEQDAPLAWFGAQPPPRSTRCSPPSRSPEFLEDDPTLPRSFLRSPPPSSISVSRGDSDEGREACDGGGGGGGGKGRLGFGGDEAGAAAAAGIAAAGVGAAHVLTGPGRLEDGAWGEASSGCPGMRYYGGARFEPLSRKRRSSGGAVAAASRGDGGSSEGGVSEAGDMGEPSPCWRAYGGHWLVLPQVELSSVAAAAQAGGGRPAAVLAVNLRWTGADGSTAPAVASTGNTSAVRSGKDGVEGERKADIGGEESTAAGSGASDVGAPAPAPPEASSTATAASKGPVTAAIGAVGGYGCERDRQRSGSGAVAAAGKGGRQPGGQDGRGGGGGLAAARARAARTLSRIACRFARPGTEAELPLPLTAGEDGDPVTNTEGPEYRRWERGIERALDDMDKERYCKVVLARTARLRFAGPLSPPNVLARFRGHYGFLFCLQPDASTAFLGCTPERLFLSKGSTVVTEALAGTRGRGDTTTEDERLGEELMDSEKFRGGGGGLRVVLALVDVRENAITADYVSAALRKAGAVKLNCSEPSLKRLTHVQHICRRITATLAPGTDNDCSEGGFCRDDAEGGGQGRGAGGAGRSLLREMHPTPAVCGTPRDVTYSVIGEVEGFDRGFYAGPVGYISAGASEFGVAIRSALVTDSWSSPEGFSRRGGVLGSAGGPAARGVGGGSEMTLFAGAGIVPGSVALLEWAETGVKMKNFLSLFPARPVRGLREMPNVNSLWGALVVEELVRLGVRHFCVCPGSRSAPLAVAIARHPSAVSISHHDERGAGFYAVGFARAGPGRGGGAHSSSTSDKAGGGGGGGVGSGALGMCAVVTSSGTAVANLLPAAAEADAAGLSMLLLTADRPPELRGCGSNQTIDQARCCMVNLLGSRARLSLDVQCPTDEVSAACLLSDIDHAVSRALGGGGGGGVPGPVHLNFMFRENLAPVEGAVRDAGVPGLSSAWSDRCLDSPRMARWEAGIEPFTTTAGGGGGLGRRGEGLQQVVDRLLCARRGILIVGSLIGPEERADVRHLAVTLRWPVYADVTSGLRCWSAEMGLGVGRLDQLLQDDAVKEAIAPDAVLQVGSPLTSKRVQKFISEPAATLTAPVSVICSPLVAWHDPGRGFTTRLASSTRDLAAAVDAGVSSSGVAIGGSELLALVDVSNAVERAQTRAIACAAAGPIEDEAGSSSLSRQPSSPPRVAKGVAAGGGEGSEGGDCYDGVNDTSEGGRRPPAQQHQQHQQHQRQQRQQQPQPLTEPFVAWCVSRHIDPAAGLFLSASMPCRDVEVFADSGLGDLDGRGEEDRGSGGRRLSDVASNRGASGIDGVFSSAMGYAAGLRSAATLLIGDMATLHDLGSLHALKGLDAAGSCSVTMVCVNNGGGGIFSFLPIADARHGDAFSPLFDTPHSVDFEGVCLSMGLEYRRATTAREFRSAYLESQGVLGGGGGEGAGTRRRRRHFFIEAVTCREENLPVHRSLGGIGRAAALDHLLRGVRLGWEFTPAPVARTWPPSPAGVSNGSLGRGRGGGDKKKPTLLLLHGFMGSKEDWRGDFAELAAAEGHAVLNVELPGHGGGSGGGSNSDGKSTTAAAGGGQRGDDVLRTVGGECDGGIVEEGGGGGGFPGVPNGDVATDDNPRGGGGTERSGERSGVSGAAATTTAQNGGGGNLVGSAPAQRDEQPRGSSSCAAGWDNESNDDGVVPSWGLGGVFLAAEAVGAVCDAVGAGPYVMVGYSMGGRVALALAARRPRVMEGGGGLVLVSSSPGLASSSAARLSRWACDRALASRIAALGRRPTASSVAGVNVRERPAEEEARAFLDRWYAAPLWGDVRHRRPSAYSAMIDRRLSNLGFDPSHRGRDDKPGAPREVIKSDSHGGKKAILNNSSTGLRRDSGLGNGRGEGNSSEAGLRTCSGRGLRSESGDRDGKKDREGICLVPTGRDGGAGGSRSLKARELARSCLALSVARQANLWPLLRQLSDKKNTDKMGGGGGAGDKNSVLPVVYVAGELDPRYGGRCGAVGGSGTSGGGGGVHGEPQVGSANAANGTTPPPSFPSEQGGAAGGGGCGADISGVVKGTSVTEVGRVAGAGAGCAALASAAVVPGARTVAQAVEELSLCKLTERRGVLVRLEALLPQSPETGVGREQEEGRRVWGVGEVTPLPADGGSGSGDGRTPKEVGPPPPPSAAAAAAAAVTTPPVGSSATAAATTTTTSATATATHPEGSSAETTTATSTTRSSPSRLLPTVRCGIEMAVVHLVARAAGVSVGAAVSAASGLPCRGAVEINGLATRGEGVATGGSTEAGPRVLKVKVGGIAGPSEDAAGGVAGVTGGGEGVEGVDLSLVEYIEEPLREPRSLGKFWERSGGIVPYALDESLAMGREKFTDKLEGCAAFVVKVSVVGGLSRSARLCGLARRLGAEAVLSSAFETGVGLAHASILASCFTTPGVAHGLSTYSRLQGDVATPGFASTVSGGKVDTLACEELLDRVAMRWDGAGV

SEQ ID NO: 93800 - protein, 481 aa, Ectothiorhodospira marina
  REGION 1..481: note = tr|A0A1H7NKC2|A0A1H7NKC2_9GAMM Isochorismate synthase MenF OS=Ectothiorhodospira marina OX=1396821; GN = menF PE=3 SV=1
MGPDRPGLSRSAPPDWAREAWTPELRPGLPLHGPSPHEPAVDRLLDEIKNWRFREGELLHAAATVPTIDPFHWLENNPGESRCLWQNRERTLTLAGIGAAAELSADTAEDYDRLLERINHIIGDRDTAFVGGFAFDGRSGEGEWHDFPAARFVLPAIELRQRDGHFRLAVNLRASTRREFVRRKTRLITSLCRLRFTPPASADAPWPIRVTRRMDDMSFDECQGHIHHILEHIQQGGIHKAVLARRVKLQLNDALPGFAALKRWHHTNSGSFCFALEHGHKLFMGCSPERLFSREDRRVCTESLAGTVRRGRSRQEDAQLEHTLLQDPKLIHEHELVTRYVRERIAPWVTHTDCPTEAGVVKLDRIQHRYLPIRATLRPGVMDDQLLKALHPTPAVCGFPRQEAQELIARRESIHRGWYSGVVGMISPRRSEFAVAIRSALVERNRVLCYSGVGIVEGSTPEAEWNELEAKIESFLAVLGS

SEQ ID NO: 93801 - protein, 462 aa, Ectothiorhodospira mobilis
  REGION 1..462: note = tr|A0A1I4SLG8|A0A1I4SLG8_ECTMO Isochorismate synthase MenF OS=Ectothiorhodospira mobilis OX=195064; GN = menF PE=3 SV=1
MDSGRPPVTSRDTPAQGTAHDRAVADLLGRIKNWQFRDGTLLRASVPLPPVDPLLWLQAHEQPPRCYWRNRDHTLTLAGLGSACTLEARSEAHYAAVLHRINTLIGDEDAFFVGGVSFDGRPGREAWARFPAALFVLPAIELRQDEAGCRLAVNLWAESQQAFMREKTRLITALCQLRFDADPPWEPPVRISRREDHMDFPACAEHIGAILERIAGGSLRKAVLARRVQLHLDTPLPVFTTLRRLRAGSTDSFCFALERDGQFYMGCSPERLFSRIDRHVCTESLAGTVRRGETPEEDRRLERLLLDDPKLVHEHELVTRYVHDQIAPWVTRAETPEHAGVVKLDRIQHRYLPLCGTLRPGVMDEQLLRTLHPTPAVCGFPRREARELILEREPVPRGWYSGTVGVVSPRHSEFAVAIRSALVEGNRMMLYSGVGIVDGSRPEAEWNELEAKLETLLCAVEN

SEQ ID NO: 93802 - protein, 415 aa, unidentified
  source 1..415: note = Edwardsiella anguillarum
  REGION 1..415: note = tr|A0A076LEA1|A0A076LEA1_9GAMM Menaquinone-specific isochorismate synthase OS=Edwardsiella anguillarum ET080813 OX=667120 GN=menF PE=4 SV=1
MALPFAAHDSDSMLAWLATQPLYPQFYWRHRSDEEEAAVCGALQVFRDAEQAQAFIRRHRQPDLRIWGLNAFDRVTLEGYGEVESLLFLPRLALLRRGDRAELVVYLYSETSLQADLPRALSDLAALLPPQPLGALQAQVLSAAHQPDHDAWCALLTQALAAIARNEFAKVVMARCTTLTLSEPLRAAQFLAASRAVNHRCYHFMLALAPHRAFLGSSPERLYRRIGVQLETEALAGTVARGGNEAQRRDNAAWLMQDGKNQHENLLVVDDICQRLRSGAGAPTLEVMAAEIVALRKVQHLRRTIHVTLNQQDDAECLRRLQPTAAVAGLPREPARYFIMRDEPFARGWYAGSAGYLSLAQAEFAVALRSALIEDDRIHLYAGAGIVAGSDPQQEWLEIENKAAGLRTLLEGESL

SEQ ID NO: 93803 - protein, 442 aa, Edwardsiella hoshinae
  REGION 1..442: note = tr|A0A376DBL3|A0A376DBL3_9GAMM Isochorismate synthase MenF OS=Edwardsiella hoshinae OX=93378 GN=menF; PE = 3 SV=1
MHQFTTLIERIVPLLDAVAHSGPGLVRVALPFRAQAGEGMLAWLASQPLYPQFYWRHRSDEEEAAVCGALQIFRDAEQAQAFIRQQNNPALRIWGLNAFDRVAVPGIGEVASLLFLPRLALLRRGDEAELVVYLYSDHSLRDDLACALRDLATLLPPQPLGSLQATVLSAAHQPDRTAWCALLQRALAAIARNDFAKVVMARRTTLTLSEPLRAAQFLAASRAVNHRCYHFMLALAPHRAFLGSSPERLYRRIGRKLETEALAGTVARGENDEQCRANAIWLMQDGKNQHENLLVVDDICQRLRGSAGAPTLEVMAAEIVTLRKVQHLRRTIHVTLNQQDDADCLRRLQPTAAVAGLPREPARRFIMRDEPFDRGWYAGSAGYLSLTRAEFAVALRSALVADQQIHLYAGAGIVAGSDPQQEWLEIENKAAGLRTLLEGESV

SEQ ID NO: 93804 - protein, 442 aa, Edwardsiella ictaluri
  REGION 1..442: note = tr|C5B7I3|C5B7I3_EDWI9 Isochorismate synthase MenF; OS = Edwardsiella ictaluri (strain 93-146) OX=634503 GN=menF; PE = 3 SV=1
MHHFTALIQRIVPQLQKAAQQGPGLVRVALPFAADDSDSMLAWLATQPLYPQFYWRHRSDEEEAAVCGALKVFRDAGQAQAFIRGYNHPDLRIWGLNAFDRVALDGYGEVESLLFLPRLALLRYGDRAELVVYLYSETSLQEDLPRALSDLATLLPPQPLGSLQAQVLSAAHQPDHGAWCALLTQALAAIARNEFAKVVMARRTTLTLCEPLRAAQFLAASRAVNHRCYHFMLALAPHRAFLGSSPERLYRRIGRQLETEALAGTVARGENEVQRRANAAWLMQDGKNQHENLLVVDDICQRLCSGAGAPTLEVMAAEIVALRKVQHLRRSIHVILNRQDDAECLRRLQPTAAVAGLPREPARYFIMRDEPFARGWYAGSAGYLALAQAEFAVALRSALIEDERIHLYAGAGIVAGSDPQQEWLEIENKAAGLRTLLEGESL

SEQ ID NO: 93805 - protein, 442 aa, unidentified
  source 1..442: note = Edwardsiella piscicida
  REGION 1..442: note = tr|A0A034SYU0|A0A034SYU0_9GAMM Isochorismate synthase MenF OS=Edwardsiella piscicida OX=1263550 GN=menF; PE = 3 SV=1
MHHFTALIQRIVPQLHKAAQQGPGLVRVALPFAAHDSDSMLAWLATQPLYPQFYWRHRSDEEEAAVCGALQVFRDAEQAQAFIRRHRQPDLRIWGLNAFDRVTLEGYGEVESLLFLPRLALLRRGDRAELVVYLYSETSLQADLPRALSDLAALLPPQPLGALQAQVLSAAHQPDHDAWCALLTQALAAIARNEFAKVVMARCTTLTLSEPLRAAQFLAASRAVNHRCYHFMLALAPHRAFLGSSPERLYRRIGVQLETEALAGTVARGGNEAQRRDNAAWLMQDGKNQHENLLVVDDICQRLRSGAGAPTLEVMAAEIVALRKVQHLRRTIHVTLNQQDDAECLRRLQPTAAVAGLPREPARYFIMRDEPFARGWYAGSAGYLSLAQAEFAVALRSALIEDDRIHLYAGAGIVAGSDPQQEWLEIENKAAGLRTLLEGESL

SEQ ID NO: 93806 - protein, 442 aa, Edwardsiella tarda
  REGION 1..442: note = tr|A0A2A7U1K3|A0A2A7U1K3_EDWTA Isochorismate synthase MenF OS=Edwardsiella tarda OX=636 GN=menF PE=3; SV = 1
MHQFTTLIERIVPLLDAVAHEGPGLVRVALPFRAQAGEGMLEWLAAQPLYPQFYWRHRSDEEEAAVCGALQIFRDAEQAQAFIRQQNNPALRIWGLNAFDRVALEGIGEVESLLFLPRLALLRRGDEAELVVYLYSDHSLRDDLARALRDLAALLPPQPLGSLQAAVLHAAHQPDRDAWCALLQSALAAIARNDFAKVVMARRTTLTLREPLRAAQFLAASRAVNHRCYHFMLALAPHHAFLGSSPERLYRRIGRKLETEALAGTVARGEDDEQCRANAIWLMQDGKNQHENLLVVDDICQRLRGSAGAPTLEVMAAEIVALRKVQHLRRTIHVTLNQQDDADCLRRLQPTAAVAGLPREPARRFIMQDEPFDRGWYAGSAGYLSLARAEFAVALRSALIVERQIHLYAGAGIVAGSDPQQEWQEIENKAAGLRTLLEGETA

SEQ ID NO: 93807 - protein, 490 aa, Eggerthella lenta
  REGION 1..490: note = tr|A0A5C5BZS0|A0A5C5BZS0_EGGLN Isochorismate synthase OS=Eggerthella lenta OX=84112 GN=FIC87_05615 PE=4; SV = 1
MTRIFSYTQPIEADIVDAYCALQKGFTDQFVYYRKDRPVRFMGMGRCIALPALDGIECELEGPVGQQPVFFSFNRFDAENPSPTDELFEAFPRLKFMLPEVILVEDDRGAYLQVNSLSPVYPGRIARFARQAAAAPRRNRRTIPFKLEPDSRAAWRANVEAALDAIGRGRISKVVLSRRQRLEALEPFSSKDLLVNLIDGPARGTVLLYRYADVFFCGCTPELLVRKRGNEVESMCLAGTCPAGATEEERARLADELMADAKNRAEHDYVVRFIREVFNRTCYDVDVPAQPGILPLTHVQHLCTPARARMLEGVDLWTMKDDLHPTPAVAGTPVGEAQMLIRSIEAYNRGFFAGACGYVDGAGDGEFSVALRTGVFDGEVGWVYAGCGIVEGSVADDEYDEIGMKLKTILSAFDGGEIPSACQPTERVDAAASRSTRSVAADEDSRTKVSPVGTSCGARHASAIDPSLGTAETLADVTNDRRHTSDGGAR

SEQ ID NO: 93808 - protein, 488 aa, Eggerthella sp.
  REGION 1..488: note = tr|A0A415XV03|A0A415XV03_9ACTN Isochorismate synthase OS=Eggerthella sp. AM16-19 OX=2292042; GN = DW178_01985 PE=4 SV=1
MTRIYSYTQPLDADIVDAFCLMQKGFTDQFVYYRKDRPTRFMGLGRCIALPTLDEVECELTGPAAEQPVFFSFNRFDAHNPAPADELFQSFPNLHFMLPEVVLIENKSGAFLQVNSLGPVYTGRVERFARLALTAPHRTRRTVSYQLELDSRSAWEQAVGSGLDAIKSGRVEKVVLSRRLKLRADEPFSSKDLLVNLIDGTAHGTVLLYRYADVFFCGCTPELLVRKTGCELESMCLAGTCPASPDPAENERLAQGLLNDAKNRAEHDYVVRFIRDVLGRTCYAVDVPKQPTIMPLTRIQHLMTPARAKLLEGVDLWSMMGDLHPTPAVSGTPVGEAKMLIRRIEAYNRGFFAGACGYVDAAGDGEFSVALRTGVFDGEIGYVYAGCGIVDGSRAADEYDEIALKLKTVLSAFDGEAVTASSHAAQTSPQTSPQTTAQNAPQTTGETNPQAASPADLQEIPQVAGQTATQTAGQTSPQTTTAGKGEAR

SEQ ID NO: 93809 - protein, 381 aa, unidentified
  source 1..381: note = Egibacter rhizosphaerae
  REGION 1..381: note = tr|A0A411YLE8|A0A411YLE8_9ACTN Isochorismate synthase OS=Egibacter rhizosphaerae OX=1670831; GN = ER308_12775 PE=4 SV=1
MVGWGEAARLPVGTGPGRFDAARDSLAGLAAYTPVDDPLDRPGTGLVATTSWAFEDDGPSVLSVPATVVGSRGGQRWVTAIGPPGDPRLEDPSAALPGPAPVRPHGRVRYAGASQSELAWLDAVARATAEIRDHAGGEPLTKVVLARDRVVWAREPFDTRLLLQRLADRFPSCFVFAIDGLVGATPELLIGRDGRSARSLVLAGTAPRGRDEVEDAELGARLLASAKDRDEHRPSVDSVREAFDGIAEDLAVDPEPWLLRLANVQHLATDVRVHLREPAPDLLELAARLHPPAAVCGSPRDAARATIRRLEQLDRGRYAAPVGWVDPSGDGELGIALRCAEVDGARARLFAGAGIVAGSLPEAELEETRHKLRAMQSAIEG

SEQ ID NO: 93810 - protein, 326 aa, Elizabethkingia meningoseptica
  REGION 1..326: note = tr|A0A376DZC9|A0A376DZC9_ELIME Isochorismate synthase entC OS=Elizabethkingia meningoseptica OX=238; GN = entC PE=4 SV=1
MILFKFPFKEFFYTLNNNTSLENTIRFHSFDNLREIIFSGSYQPITKEEILNLNITSQNLQQEYQSPPESKDEYISRIENVIGIIKDNQLPKVVISRQKWVPISEHETIDLGSTFLKLCKDYPNAFIHLFADKDEAWIGATPEVLGQYNKITKDFETMSLAGTLPVSEEWSEKEIEEQKPVSTYIQSVLGRYSQQVKISPVYDHISGNIKHLRNDFKAVINRHNISDLIKELHPTPAVCGVPKEQCSEIIENNEKYNRAFYAGYIQTEQDNEITCFVNLRCAQLFRNGILLYAGGGITALSEPEKEWKETEMKADAVLQRLTFLGT

SEQ ID NO: 93811 - protein, 326 aa, Elizabethkingia miricola
  REGION 1..326: note = tr|A0A0D5BTH9|A0A0D5BTH9_ELIMR Isochorismate synthase EntC OS=Elizabethkingia miricola OX=172045; GN = entC PE=4 SV=1
MILFKFPFKEVFYTLNSDTPLKNTIKFHSFDNQKEITFDGSFQPITEQEILNLNITSQNIQQEYHGTPETKNEYLARIENVIGIIKENQLPKVVISRQKWVDTPEHETIDLGKTFLKLCKDYPNAFIHLFVDKNEAWIGATPEVLGQYNKITEDLETMSLAGTLPVSEDWSEKEIEEQKPVSIYIQSVLSRYSQQVEISPVYDHISGNIKHLRNDFKAVVSGQDISTLIKELHPTPAVCGVPKDLCSEIIKKTEKYNRAFYAGYIQTEQDNETTCYVNLRCAQLFRNGILLYAGGGITALSEPEKEWKETEMKADAVLQRLTFLGA

SEQ ID NO: 93812 - protein, 340 aa, Empedobacter brevis
  REGION 1..340: note = tr|A0A3P6MJU2|A0A3P6MJU2_9FLAO Menaquinone-specific isochorismate synthase OS=Empedobacter brevis OX=247; GN = menF PE=4 SV=1
MFRQFQDKLERLIQQKKPFVLFRKPNETKVELWENQEKKTARKFSCNSFDNSTLIEFNDDEVVEILIDDLPKIELLLPISTQNEAISYNDYINLIEKTVEELKSDSDTQKIVISRIKELDKHDIDLSETFKNLHQHYPNAYVYLRYDVEEGCWIGASPELLLKEENQLIQTVSLAGTKAKEDDWTDKEYHEQQVVTDYITATLSGFTNYIDVDGPFSVNAGFFEHLKSFISAQLIDKDKLYDVLKALHPTPAVGGMPKDLAKDFIIKNEGYNRTFYAGFMGYETETEAEFFVNLRCAKIYQNKVKLYVGGGIMPDSIPENEWNETELKSKTIGELLIELK

SEQ ID NO: 93813 - protein, 341 aa, unidentified
  source 1..341: note = Empedobacter falsenii
  REGION 1..341: note = tr|A0A427BJG8|A0A427BJG8_9FLAO Isochorismate synthase OS=Empedobacter falsenii OX=343874 GN=EGI89_12005; PE = 4 SV=1
MFKKFQDKLERLIQNQKPFLLFRKPNSIQVELWENKEIKSDNKFICNSFDNTKLIEFNDDEIVEISIDELPNFELSLPESDQNEAISYENYIDLIQKTVEELQSDSPTKKIVISRINSLPETNINLVETFKNLHQHYPNAYVYLRFDTEEGCWIGASPELLLKENNQFIQTVSLAGTKAKEDEWTEKEYHEQQVVTDYISSTLEPYTSYIDVDGPFSVNAGFFEHLKSFISAQLKDKSQLYDLLKALHPTPAVGGMPKDLSKDFILENEGYNRTFYAGFMGFQNKTESEYFVNLRCAKIYSNKVNLYVGGGIMPDSIPENEWRETELKSKTIGELLVKTEN

SEQ ID NO: 93814 - protein, 381 aa, unidentified
  source 1..381: note = Empedobacter haloabium
  REGION 1..381: note = tr|A0A5C7BZZ3|A0A5C7BZZ3_9FLAO Isochorismate synthase OS=Empedobacter haloabium OX=592317; GN = E7V67_10955 PE=4 SV=1
MATSLFLSRHRSVRASGVFERIATPAAGGALHAELARALLRARDAGIADPIVIGAIPFDTTQPSELLVPERSEIFDRDTLPQLAALPLAPVVASTSIPGEERFKQGVRQAVANFTHSEIRKAVLSRVLEVELAGRADPAAIFASLAAQNPTGFQFRIPLASGAELVGVSPELLLRKEGAQIVSNPLAGSARRQPDADSDAAAGGALLQSPKDLREHRYVTDDIRRLLVPLCASLDVPEQPSLLSTNAMWHLSTRIEGTLRDPAQTSLQLACHLHPTPAVCGYPTDLARKLIDLVEPFDRGLFAGVVGWCDAHGNGEWAVTIRCGTVQGNTIRLFAGAGIVADSCPEAEWAETQGKLGTMLRALGAARPAVSANVETAAEAA

SEQ ID NO: 93815 - protein, 340 aa, Empedobacter sp.
  REGION 1..340: note = tr|A0A4Z1BSA4|A0A4Z1BSA4_9FLAO Isochorismate synthase OS=Empedobacter sp. MRS2 OX=2491114; GN = E4J94_06350 PE=4 SV=1
MFKKFQDKLERLIQNQKPFLLFRKPNSIQVELWENKGFESDNKFICNSFDNTKLIEFNDDEVVEISIDELPNFELSLPKSDQNEAISYENYIDLIQKTVQELQSESPTKKIVISRINSLPETNINLVETFKNLHQHYPNAYVYLRFDAEEGCWIGASPELLLKENNHFIQTVSLAGTKAKEDEWTEKEYHEQQVVTDYISSTLEPYTSYIDVDGPFSVNAGFFEHLKSFISAQLKDKSQLYDLLKALHPTPAVGGMPKDLSKDFILKNEGYDRVFYAGFMGYQNKTESEYFVNLRCAKIFSNKVNLYVGGGIMPDSIPENEWRETELKSKTIGELLVKSN

SEQ ID NO: 93816 - protein, 403 aa, Emticicia sp.
  REGION 1..403: note = tr|A0A4Q5M1Z9|A0A4Q5M1Z9_9BACT Isochorismate synthase OS=Emticicia sp. 17J42-9 OX=2492393; GN = EWM59_07055 PE=4 SV=1
MTTTNLKTSTYRQTLWNAALESGFPTAMWRLPKQNDKHFLTSFLKNPEQIKIEFEELGPGFAFSPFINPDGNDTYFLKADLHYIFSDAATSENETFQEIIVPASVDPDFIDLLNAQPSTKPFFSLKNGAVANTTSSEEFIEEVNTAINDIEAGKFKKVVLSRTKNFSIPTDFEIVTVFDKLCVAYPNAFVSVVSIPSLGMVWMGASPETLVSQDAQGIFRTMALAGTQSAFDADGNLIKPSEALWRQKEIEEHALVSRYIVSCLKKIRVREFEEEGPKTVIAGNLMHLRMDFIVDTVEINFPEMATVMLDLLHPTSAVCGMPKEPARQFILANEKYDREFYSGFLGPVNIQQESHIFVNLRTMKLQNGIATLYAGCGITADSNAEKEWIETEMKLQTLGKFLV

SEQ ID NO: 93817 - protein, 258 aa, unidentified
  source 1..258: note = Unknown
  REGION 1..258: note = tr|G2DA41|G2DA41_9GAMM Menaquinone-specific isochorismate synthase OS=endosymbiont of Riftia pachyptila (vent Ph05) OX=1048808 GN=menF PE=4 SV=1
MQQAKESIRNSDLEKVVLTRQIRVEAQRRLDPGRLMATLDCLYPSSRHLAFRIGEHSFVAATPERLLACQGSQINCDAIGGTSRRSADEREDKILGESLLNNPKALHEHALVVDTIQHALTPICSRFEPSSGPQLLPLRGLQHLHTEIQGSLKPDTSLLQAAARLHPTGAVNGVPTAVASQWLAQHEALERGWYTGAAGWINAEGDGELAVLLRCALLDGSQAHLYAGAGITAGSDPDAEFDETELKLAAMLEALENA

SEQ ID NO: 93818 - protein, 419 aa, unidentified
  source 1..419: note = Endozoicomonadaceae bacterium
  REGION 1..419: note = tr|A0A3S3Q8G3|A0A3S3Q8G3_9GAMM Isochorismate synthase OS=Endozoicomonadaceae bacterium GTF-13; OX = 2506149 GN=DZC74_11670 PE=4 SV=1
MPLLQLEEPLGGLATEALVPWLQASDRFPRMLWQSRDGQLTVAALGLASRFKAPQEHPTHARRIWCVAGFDANQSWNGYPAHLSYIPEIELEHSPAGWTLRISLGPETSVEQLQRSLATLHRISPEPDAGLPPVVAPVRHQPQQPQWCQQVGAVQRAIADGELQKVVLARQSSLRFEAAPSLWSLYRSWSQQALNCYRFVFEPAPGDGFISLSPERLMQRSGDQLLTEALAGTAPRPSQSAEARDASLELLADSKNRHEHQLVIEDIQHKLASIGLSCSQRCETSVLQQRGIQHLHQLLQGYANPMPADTLIAHTLHPTAAVGGLPGEAASRFLCHNESLVRGWYAGYCGYLAPAAAELAVTIRSARLQGNELQLFAGAGIVALSDPLAEWQELDQKIALPLSLFVPGEEHVSRRTSLS

SEQ ID NO: 93819 - protein, 467 aa, Endozoicomonas montiporae
  REGION 1..467: note = tr|A0A142BEV6|A0A142BEV6_9GAMM Isochorismate synthase OS=Endozoicomonas montiporae CL-33 OX=570277; GN = menF PE=4 SV=1
MQEVNIHTPVLTKRLQQLLHKPAPGVPFVRIEQPVPVCNLLTWLEHQNAHLQRSYWRDRDADIEIATLGQCWKMPIPSRQELSKATNTVQRLINDSGHWAEKARSLLWLSFSDVDRMVWPTFGYGCVYLPGIEMQLTRKGATLACYIQAGTDELWQSGIRSTLKQLDAINWQVTGAREAYQLGPVQYQPDQAGWNGNIAKATRAFAAGEMQKVVLSRSASLTIEGVFSPWRLLQRWRTANPRSYVFAVEAKCGDLFFGCTPERLMARRGRVLHTEALAGTTPRGGTREEDKVLEQTLLSDRKNIHENRLVLNDIRERLGVLCQSLEADRSHSVVKLKSIQHLRYLIRGVLHAGVTDAQLLTALHPTPAVGGTSREVAMSFIEQREGYARGLYAGVFGIVSPEHTEMAVTIRSGLLRRLSDNLQQLSLFSGGGIVQGSVAAEEWQELNNKLATVYSLLKDAEQETVAL

SEQ ID NO: 93820 - protein, 419 aa, Endozoicomonas sp.; identical to SEQ ID NO: 93818
  REGION 1..419: note = tr|A0A3P3VJN2|A0A3P3VJN2_9GAMM Isochorismate synthase OS=Endozoicomonas sp. GTF13 OX=2528527; GN = D0544_11695 PE=4 SV=1

SEQ ID NO: 93821 - protein, 440 aa, unidentified
  source 1..440: note = Enterobacillus tribolii
  REGION 1..440: note = tr|A0A370R2G7|A0A370R2G7_9ENTR Isochorismate synthase MenF OS=Enterobacillus tribolii OX=1487935; GN = menF PE=3 SV=1
MVQIPVLIARAIPLLHQAAADKPGLVRVSVPCSLRDGALLLDWLAAQPLYPQFYWRQRDGSEEAAVCGSVRTFRDSRQARDFIREHNEPELRIWGLNAFDQMTLEAFGTLDSLLFVPRIALIRHAGNAELVVYLCSDTSLRDDLPLALAALESLCAAQPLPVLRANVTDVHHQPEKEAWCDLLRQALDAIARKAFEKVVLARRTTLTLDAPLNAAQFLAASRQVNHRCYHFMLALAPEQAFLGSSPERLYRRHHLTLETEALAGTVGSGENDAQAQENARWLMNDGKNQHENLLVVDDICQRLQGGAETLDVMPAEIVRLRKVQHLRRPIHATLLQEDDADCLLRLQPTAAVAGLPREPARRFIRDEEPFERGWYAGTAGYLSLHRAEFCVALRSALIQERQIHLYAGAGIVAGSDPQEEWLEIESKAAGLRTLLDNDAG

SEQ ID NO: 93822 - protein, 204 aa, unidentified
  source 1..204: note = Enterobacter agglomerans
  REGION 1..204: note = tr|A0A379AMC7|A0A379AMC7_ENTAG Isochorismate synthase entC OS=Enterobacter agglomerans OX=549 GN=entC_2; PE = 4 SV=1
MQRIVAQNPNSYHFHLPLPDGGALVGASPELMIRKQGRQFSSCPLAGSAPRHRDPQRDQASGDSLMHSAKDRHEHKLVTDAMRATLQPRSRLLSVPETPSLLTTATLWHLATQIQGDVLDDRENALSLACLLHPTPALSGFPHQRAQALIQRLEPFERQLFGGIVGWCDDQGNGEWGRHHSLRYGEWPAGAAVCGRRHRSGLTT

SEQ ID NO: 93823 - protein, 431 aa, Enterobacter asburiae
  REGION 1..431: note = tr|A0A263VXQ6|A0A263VXQ6_ENTAS Isochorismate synthase MenF OS=Enterobacter asburiae OX=61645 GN=menF; PE = 3 SV=1
MNSIFLALEQLRTQLSQALPAAPGIRHFDVSFPLNDAFDPLAWLGEQQCYPQFYWQQRNGDEELAALGAVNQFSSLALASQFLREQNAAQDTRICGLNAFNPEQGSLFLPRLLWRRTAGNATLRLQLWSDRSLVEDARAALDFLQRLRPAKSIRPLSVQVEHETHQPQQAEWLKLIRRATETIARGEFEKVVLARATDLQFTQRVNPVALMAASRALNLHCYHFCMVFDASNAFLGSTPERLWRRRGKLLRTEALAGTVASHIDDSQAQRLGEWLLNDDKNQRENMLVVEDICQRLQRSTRMLEVLPPQVVRLRKVQHLRRCIWTELKQADDEQCLLMLQPTAAVAGLPRQPAREFIQKVEPFNREWYAGSAGYLSPEQSEFCVALRSARVQEDSLRLYAGAGIVSGSDPEQEWQEIENKAAGLRSLLLRD

SEQ ID NO: 93824 - protein, 431 aa, unidentified
  source 1..431: note = Enterobacter bugandensis
  REGION 1..431: note = tr|A0A3S0GB79|A0A3S0GB79_9ENTR Isochorismate synthase MenF OS=Enterobacter bugandensis OX=881260; GN = menF PE=3 SV=1
MNSIFLALEQLRSHLSQALPATSGLRHFDVSFPLNDAFDPLAWLGEQQCYPQFYWQKRNGDEELAALGAVVQFSSLALASQFLSAQHGPEDTRICGLNAFNPEQGSLFLPRLLWRRTAGNATLRLQLWSDSSLEDDADTARAFLQQLLPARPIRPLSVQVDRETHHPEKPQWLSLIGKATETIARGDFEKVVLARATDLQCKQRVNPVALMAASRALNLNCYHFCMIFDASNAFLGSTPERLWRRRGKLLRTEALAGTVASHTDDKQAQRLGEWLLNDDKNQRENMLVVEDICQRLQHHTQTLEVLPAQVVRLRKVQHLRRCIWTELKQADDELCLHVLQPTAAVAGLPRQPAREFIQHVEPFNREWYAGSAGYLSPEQSEFCVALRSARVQEDALRLYAGAGIVSGSDPEQEWQEIENKAAGLRSLLLRD

SEQ ID NO: 93825 - protein, 428 aa, Enterobacter cancerogenus
  REGION 1..428: note = tr|D2ZEW4|D2ZEW4_9ENTR Isochorismate synthase MenF; OS = Enterobacter cancerogenus ATCC 35316 OX=500639 GN=menF; PE = 3 SV=1
MSIALERLRSQLAQALPATPGLRHFDVSFPLNDAFDPLAWLGVQVCYPQFYWQQRNGDEELSALGAVIHFPSLASASQFLHSHPQQADTRICGLNAFNPEQGSLFLPRLLWRRHAGVATLRLQLWSETSLQDDARTALAFLDALREARPISPLSVQVLHETHHPQKPEWLRLVQQATDAIAQGDFEKVVLARATDLQFNRPISAVALMAASRAVNLRCYHFCMVFDAHNAFIGSTPERLWRRRGALLRTEALAGTVAGHPDDRQAQRLGEWLLNDDKNQRENMLVVEDICQRLQHHTRTLEVLPAQVVRLRKVQHLRRCIWTELKQADDERCLHVLQPTAAVAGLPRQPAREFIDNNEPFDREWYAGSAGFLSPERSEFCVALRSARIHDDTLRLYAGAGIVSGSDPEQEWQEIENKAAGLRSLLLRD

SEQ ID NO: 93826 - protein, 431 aa, unidentified
  source 1..431: note = Enterobacter chengduensis
  REGION 1..431: note = tr|A0A0F4B563|A0A0F4B563_9ENTR Isochorismate synthase MenF OS=Enterobacter chengduensis OX=2494701; GN = menF PE=3 SV=1
MNSIFLALEQLRTQLTQALPAAPGLRHFDVTFPLNDAFDPLAWLGAQQCYPQFYWQQRNGDEELAALGAVAHFSSLALACQFLRDQNAPDDTRICGLNAFNPEQGSLFLPRLLWRRTAGNATLRLQLWGNSSLQDDARAAQVFLQQLLAAKPIRPLSVQVEHETHLPQKSAWLSLINKATETIAHGDFEKVVLARATDLQCKQRVNPVALMAASRALNFNCYHFCMVFDASNAFLGSTPERLWRRRGALLRTEALAGTVASHADDSQAQRLGEWLLNDDKNQRENMLVVEDICQRLQHHTQTLEVLPAQVVRLRKVQHLRRCIWTELKQADDALCLHVLQPTAAVAGLPRQPAREFIQAVEPFNREWYAGSVGYLSPEQSEFCVALRSARVREDSLRLYAGAGIVSGSDPEQEWQEIENKAAGLRSLLLRD

SEQ ID NO: 93827 - protein, 431 aa, unidentified
  source 1..431: note = Enterobacter chuandaensis
  REGION 1..431: note = tr|A0A3A3ZEG1|A0A3A3ZEG1_9ENTR Isochorismate synthase MenF OS=Enterobacter chuandaensis OX=2497875; GN = menF PE=3 SV=1
MNSIFLALEQLRTQLSQALPATSGLRHFDVSFPLNDAFDPLAWLGEQQCYPQFYWQQRNGDEELAALGAVTQFSSLALASQFLSAQHAPDDTRICGLNAFNPEQGNLFLPRLLWRRTAGHATLRLQLWSDSSLEDDADTARAFLQYLLPARPIRPLSVQVKRETHYPEKPQWLSLIRKATETIAHGDFEKVVLARATDLQCRQRVNPVALMAASRALNLNCYHFCMIFDASNAFLGSTPERLWRRRGTLLRTEALAGTVASHTDDKQAQRLGDWLLNDDKNQRENMLVVEDICQRLQHHTQALEVLPAQVVRLRKVQHLRRCIWTELKQADDELCLHVLQPTAAVAGLPRQPAREFIQHVEPFNREWYAGSAGYLSPEQSEFCVALRSARVQDDALRLYAGAGIVSGSDPEQEWQEIENKAAGLRSLLLRD

SEQ ID NO: 93828 - protein, 391 aa, Enterobacter cloacae
  REGION 1..391: note = tr|A0A155Y900|A0A155Y900_ENTCL Isochorismate synthase OS=Enterobacter cloacae OX=550 GN=entC PE=4 SV=1
MDTSLAEDLQHTATTLQSDSFFFMSPYRSFTTSGCFARFSEPAVGGDDPAGPFQQKLAQAFQNAKNSGIAHPVMVGAIPFDTRKPSSLFIPQRWQTFSRPARQQSARYASGAQTLNVQQRTEIPPQPVFEEMVARAASLTATPQVNKVVLSRLIDIATDKQIDSSALMERLIAQNPASFNFHVPLEDGGVLLGASPELLLRKEGAHFSSLPLAGSARRQPDDVLDREAGTKLLASEKDRHEHDLVTQAMKTILEPRSHHLTMPASPQLITTPTLWHLATPVEGDARENENALTLACLLHPTPALSGFPHQAAKELIAELEPFDRELFGGIVGWCDSEGNGEWVVTIRCARLHQNTVRLFAGAGIVPASSPVGEWRETGVKLSTMLNVFGLH

SEQ ID NO: 93829 - protein, 431 aa, unidentified
  source 1..431: note = Enterobacter genomosp.
  REGION 1..431: note = tr|A0A0X4EC84|A0A0X4EC84_9ENTR Isochorismate synthase MenF OS=Enterobacter genomosp. O OX=2364150; GN = menF PE=3 SV=1
MNSIFLALEHLRTQLTQALPAAPGIRHFDVSFPLNDAFDPLAWLGAQQCYPQFYWQQRNGDEELAALGAVTHFSSLAIASQFLREQNAAGDTRICGLNAFNPEQGSLFLPRLLWRRTAGNATLRLQLWSERSLQDDAFAARDFLQQLQPARPIRPLAVQVEHETHQPQQAEWLRLVHRATETIARGDFEKVVLARATDLQFTRRINPVALMAASRALNLHCYHFCMVFDASNAFLGSTPERLWRRRGRLLRTEALAGTVASHNDDKQAQRLGEWLLNDDKNQRENMLVVEDICQRLQHHTQTLEVLPAQVVRLRKVQHLRRCIWTELKQADDEQCLNMLQPTAAVAGLPRQPAREFIQKVEPFNREWYAGSAGYLSPDQSEFCVALRSARVLEDSLRLYAGAGIVSGSDPEQEWQEIENKAAGLRSLLLRD

SEQ ID NO: 93830 - protein, 431 aa, Enterobacter hormaechei
  REGION 1..431: note = tr|F5S0D0|F5S0D0_9ENTR Isochorismate synthase MenF; OS = Enterobacter hormaechei ATCC 49162 OX=888063 GN=menF; PE = 3 SV=1
MHSIFLALQSLRTQLAQALPATPGLRHFDVSFPLNDAFDPLAWLGVQRCYPQFYWQQRSGDEELAALGSLARFDSLASASRFLHTHDVAHDTRICGLNAFNPAQGVLFLPRLLWRRSAGVATLRLQLWSETSLCEDAREALNFIDNLRDAAPIRPLSVQIVQETHHPEKPEWLALIRQATETLARGDFEKVVLARATDVQCQQPVNAIALMAASRALNLNCYHFCMVFDASNAFLGSTPERLWRRRGTLLRTEALAGTVASHSDDKQAQRLGDWLMNDDKNQRENMLVVEDICQRLQHYTRTLEVLPAQVLRLRKVQHLRRCIWTELIQPDDEQCLHILQPTAAVAGLPRQAAREFIANVEPFDREWYAGSAGYLSPDQSEFCVALRSARVRDDALRLYAGAGIVSGSDPEQEWQEIENKAAGLRSLLLRD

SEQ ID NO: 93831 - protein, 431 aa, unidentified
  source 1..431: note = Enterobacter huaxiensis
  REGION 1..431: note = tr|A0A428LLR8|A0A428LLR8_9ENTR Isochorismate synthase MenF OS=Enterobacter huaxiensis OX=2494702; GN = menF PE=3 SV=1
MHSIFLALERLRTQLAQALPATPGLHHVDVSFPLNDAFDPLAWLGAQRIYPQFYWQQRNGDEELAALGSVAHFDSLASASQFLQTHDAQNDTLICGLNAFNPEKSSLFLPRLLWRRSAGVATLRLQLWSDTSLADDAPAARRFLDQLNAAGPIRPLSVQVERETHQPQKPEWLRLIRQATDAIARGDVEKVVLARATDLQFRQPVNAVALMAASRALNVNCYHFCMVFDAGNAFLGSTPERLWRRRGTLLRTEALAGTVASHSDDKQAQRLGEWLMNDDKNQRENMLVVEDICQRLQHHTQTLEVLPAQVVRLRKVQHLRRCIWTALKHASDEQCLNALQPTAAVAGLPRQAAREFIQKVEPFDREWYAGSAGYLSREQSEFCVALRSARVHEAMLRLYAGAGIVSGSDPEQEWQEIENKAAGLRSLLLRD

SEQ ID NO: 93832 - protein, 391 aa, Enterobacter kobei
  REGION 1..391: note = tr|A0A5C1XMY3|A0A5C1XMY3_9ENTR Isochorismate synthase EntC OS=Enterobacter kobei OX=208224 GN=entC PE=4; SV = 1
MDTSLAEEVQHTATTLPSDSFFFMSPYRSFTTSGCFARFSEPAVGGDDPAGHFQQKLAQAFRNAKASGIAHPVMVGAIPFDTRKPSSLFIPQRWQTFSRPARQQSARYFSGSQALKVQQRTEIPAQSVFEEMVARAASLTATPRVNKVVLSRLIDIAADKKLDSGALMERLIAQNPASFNFHVPLEDGGVLLGASPELLLRKEGAHFSSLPLAGSARRQPDDVLDREAGNKLLASEKDRHEHDLVTQAMKAILEPRSHHLSMPSSPQLITTPTLWHLATPVEGEARENENALTLACLLHPTPALSGFPHQAAKALIAELEPFDRELFGGIVGWCDSEGNGEWVVTIRCARLHNNTVRLFAGAGIVPASSPVGEWRETGVKLSTMLNVFGLH

SEQ ID NO: 93833 - protein, 430 aa, unidentified
  source 1..430: note = Enterobacter lignolyticus
  REGION 1..430: note = tr|E3GB50|E3GB50_ENTLS Isochorismate synthase MenF; OS = Enterobacter lignolyticus (strain SCF1) OX=701347; GN = menF PE=3 SV=1
MLSISVALESLQGFLSDELPDAPGTRFVDIPFALNDAFDPLAWLCCQPVWPQFYWQQRNGDEEVAALGAVRRFAALPQADHFLQQPAAADLRVWGLNAFAPEQGALFLPRLEWRRSAGKASLRLTLSSDTSLRQDAQRARDMLSQLLPGGALPELSLSLKSERHHPDRAGWFRLIAQATDAIAAGELDKVVLARATDLRFSQPLCAGAIMAASRRVNLHCYHFYMAFDADSAFLGSSPERLWRRRGNLLRTEALAGTVASHPDERQAQHLANWLMYDDKNQRENMLVVEDICQRLQDDVQALEVLPPQVVRLRKVQHLRRCIWTTLTSPDDARCLLQLQPTAAVAGLPRDVARRFIEHHEPFVREWYAGSAGYLSRERSEFCVALRSAKVTGDTLRLYAGAGIVRGSDPEQEWQEITNKAAGLRSLVLDD

SEQ ID NO: 93834 - protein, 431 aa, Enterobacter ludwigii
  REGION 1..431: note = tr|W0BM60|W0BM60_9ENTR Isochorismate synthase MenF; OS = Enterobacter ludwigii OX=299767 GN=menF PE=3 SV=1
MNSISTALEHLRSQLTQALPTAPGLHHFDVSFPLNDAFDPLAWLGVQHCYPQFYWQQRNGDEELAALGAVAHFSSLACASQFLQAHDAARDTRICGLNAFNPEQGSLFLPRLLWRRTAGQATLRLQLWSDSSLHDDARAALDFLQQLGEARPIRPLSVEVVQEKHHPEQPEWLRLIRKATQTIARGDFEKVVLARATDLQFKHSVNPVALMAASRALNLNCYHFCMVFDASNAFLGSTPERLWRRRGKLLRTEALAGTVASHTDDKQAERLGDWLMNDDKNQRENMLVVEDICQRLQHHTQTLEVLPAQVVRLRKVQHLRRCIWTELKHADDAQCLHVLQPTAAVAGLPRQAARDFIYHNEPFDREWYAGSAGYLSPEQSEFCVALRSARVYEDALRLYAGAGIVSGSDPEQEWQEIENKVAGLRSLLLRD

SEQ ID NO: 93835 - protein, 431 aa, Enterobacter mori
  REGION 1..431: note = tr|A0A2J0NJB6|A0A2J0NJB6_9ENTR Isochorismate synthase MenF OS=Enterobacter mori OX=539813 GN=menF PE=3; SV = 1
MHSIFLALEQLRTRLAQALPATPGLRHFDVSFPLNDAFDPLAWLGAQQCYPQFYWQQRSGDEELAALGAVIHFSSLALASQFLHTQHAAGDTRICGLNAFSPEKGSLFLPRLLWRRSGGVATLRMQLWSECSLQDDAQVALRFLDSLQHAKPIRPLSVQVERETHQPQKPEWLRLIRQATETIAHGEFEKVVLARATDLQCHQPVNAVALMAASRALNLNCYHFCMVFDASNAFLGSTPERLWRRRGTLLRTEALAGTVASHADDAQARRLGEWLMKDDKNQRENMLVVEDICERLQHHTQTLEVLPAQVVRLRKVQHLRRCIWTELKHADDEQCLHVLQPTAAVAGLPRQAARAFIQNVEPFDREWYAGSAGYLSPEQSEFCVALRSARVHGAALRLYAGAGIVSGSDPEQEWQEIENKAAGLRSLLLRD

SEQ ID NO: 93836 - protein, 431 aa, unidentified
  source 1..431: note = Enterobacter roggenkampii
  REGION 1..431: note = tr|V3EKW2|V3EKW2_9ENTR Isochorismate synthase MenF; OS = Enterobacter roggenkampii OX=1812935 GN=menF PE=3 SV=1
MNSIFLALEQLRTQLSQALPATPGIRHFDVSFPLNDAFDPLAWLGAQQCYPQFYWQQRNGDEELAALGAVITFSSLALATQFLREQNAAGDTRICGLNAFNPEQGSLFLPRLLWRRTAGTATLRLQLWSDYSLQEDAHAARDFLQQLQPARPIRPLAVQVEHENHQPQRAEWLKLVRRATETIARGDFEKVVLARATDLQFTQRINPVALMAASRALNLHCYHFCMVFDASNAFLGSTPERLWRRRGTLLRTEALAGTVASHTDDKKAQRLGEWLLNDDKNQRENMLVVEDICQRLQHSTQTLEVLPAQVVRLRKVQHLRRCIWTELKQADDEQCLHMLQPTAAVAGLPRQPAREFIQKVEPFNREWYAGSAGYLSPDQSEFCVALRSARVQDDSLRLYAGAGIVSGSDPEQEWQEIENKAAGLRSLLLRD

SEQ ID NO: 93837 - protein, 431 aa, unidentified
  source 1..431: note = Enterobacter sichuanensis
  REGION 1..431: note = tr|A0A0F1AS97|A0A0F1AS97_9ENTR Isochorismate synthase MenF OS=Enterobacter sichuanensis OX=2071710; GN = menF PE=3 SV=1
MHSISTALERLRTQLAQALPAIPGLRHFDVSFPLNDAFDPLAWLGAQQCYPQFYWQQRNGDEELAALGAVTRFSSLTEASQFLRAQHAAGDTRICGLNAFNPEQGSLFLPRLLWRRSAGHATLRLQLWSDSSLQDDALAARDFLQQLRPAKPVRPLSVQVEHETHQPQQPEWLRLVCKATDTIARGDFEKVVLARATDLQFTQRVNPVALMAASRALNLNCFHFCMVFDASNAFLGSTPERLWRRRGKLLRTEALAGTVSSHPDDKQAQRLGEWLLNDDKNQRENMLVVEDICQRLQRHTQTLEVLPPQVVRLRKVQHLRRCIWTELKQADDEQCLHMLQPTAAVAGLPRQPAREFIQKVEPFNREWYAGSAGYLSPDQSEFCVALRSARVQEDSLRLYAGAGIVSGSDPEQEWQEIENKAAGLRSLLLRD

SEQ ID NO: 93838 - protein, 431 aa, Enterobacter soli
  REGION 1..431: note = tr|A0A198GDE4|A0A198GDE4_9ENTR Isochorismate synthase MenF OS=Enterobacter soli ATCC BAA-2102; OX = 1354262 GN=menF PE=3 SV=1
MQSIFIALERLRDQLAQALPATPGLRHFDVSFPLNDAFDPLAWLGSQTCYPQFYWQQRNGDEELAALGAVVHFSSLASAAQFLNACDAPDTTRICGLNAFNPAQGSLFLPRLLWLRNAGIATLRLHLWSATSLQDDAHQALDFLQQLGETRPIPALALQALRETHQPDKPEWLRLVRLATQTIAHGGFDKVVLARATDVQFNQRVNAIALMAASRALNLHCYHFCMVFDASNAFLGSTPERLWRRRGMLLRTEALAGTVASHAEDKQAKRLGDWLMNDDKNQRENMLVVEDICQRLQHHTRTLEVLPAQIVRLRKVQHLRRCIWTALKHTDDEQCLHVLQPTAAVAGLPRQAASEFIENNEPFDREWYAGSAGYLSPGQSEFCVALRSARLHNDALRLYAGAGIVSGSDPEQEWLEIENKAAGLRTLLLRD

SEQ ID NO: 93839 - protein, 431 aa, Enterobacter sp.
  REGION 1..431: note = tr|A4WCQ0|A4WCQ0_ENT38 Isochorismate synthase MenF; OS = Enterobacter sp. (strain 638) OX=399742 GN=menF PE=3; SV = 1
MHSISIALERLGDFMQQDIPATPGLRHFDVSFPLNDAFDPLAWLGAQIAYPQFYWQQRNGDEELAALGAAEHFSTLSAARQFLNNRHACAETRICGLNAFTPEQSHLFLPRLLWQRTGGMASLRLNLSSNVSLQDDARRALEFLQQLQTIRPITTLSSQIVRETHLPARPEWLSLVSQATDAIAHGEFEKVVLARATDLHFDQRVNAIALMAASRRINHNCYHYCMIFDAQNAFMGSSPERLWRRRGTLLRTEALAGTVASHADDAQSHRLGEWLLNDDKNQRENMLVVEDICERLQHHTQALEVLPAQVVRLRKVQHLRRCIWTELNLADDEQCLHLLQPTAAVAGLPRDSARAFIQRNEPFEREWYAGSAGYLSPEQSEFCVTLRCARVSHTAVRLYAGAGIISGSVPEEEWQEIENKAAGLRTLLLMD

SEQ ID NO: 93840 - protein, 457 aa, unidentified
  source 1..457: note = Enterobacterales bacterium
  REGION 1..457: note = tr|A0A389MCV1|A0A389MCV1_9GAMM Isochorismate synthase MenF OS=Enterobacterales bacterium OX=1993870; GN = menF PE=3 SV=1
MKQISAILDQLDTALSGDFPDEAGLRQFSYTLADQPENGMLEWLNMQACYPKFYWQQRDENEESALCGDARTFGSLTAAQAFLQQFPQLPELRVWGLNAFNGADDVAADTNALFLPRIEINRQGGVCTLFCNLYSANSLRGEAKRMRTFVHSLVNRRPLPTLTSQVLQHQHLPTEPQWKQIIHRALNSIEQGQFDKVVLARKTTLTLSQPLNAAAFLAASRAVNHDCYHFMLAFTAQQAFLGSSPERLFMRENHELCTEALAGTVASAVESRQAHALGQWLLKDAKNQRENMLVVDDICQRLQGSAHSLDVMPAEILRLRKVQHLRRSIHAVLTHADDANCLQRLQPTAAVAGLPRQAAREFITQHEPFDRQWYAGSAGFISLARSEFAVALRSAAVKGRELMLFAGAGIVAGSDASQEWQEIENKAAGLRTLLEENVVLVDSVLPQENFAPAVWAG

SEQ ID NO: 93841 - protein, 445 aa, unidentified
  source 1..445: note = Enterobacteriaceae bacterium
  REGION 1..445: note = tr|A0A4S3LLL2|A0A4S3LLL2_9ENTR Isochorismate synthase MenF OS=Enterobacteriaceae bacterium ML5; OX = 2507584 GN=menF PE=3 SV=1
MKQISAIIDQLDATLAGEWPDAAGIRQFSYSLQKQPDTGLLEWLSAQPCYPKFYWQQRDGHDEAAVCGDAYAFGDMQQAQDFIRQHRDIPDLHIWGLNAFNGADAGGRAANALFLPRIELCRSGTTYWLRCTLFSAVSLREEARRTRLFLRSLVASHALPPIMSRVVQHQHLPAEPQWNQLINRALKGIEQQQFDKVVLARKTTLTLSQPLNACAFLAASRAVNHHCYHFMLAFTPQQAFLGSSPERLFLRDHTELFTEALAGTVANHPDLQKARELGEWLLNDGKNQRENLLVVDDICQRLQGGAHSLDVMPAEILRLRKVQHLRRSIHGELTGADDAGCLQRLQPTAAVAGLPRQAAREFIAGHEPFDREWYAGSAGYLSTEQSEFTVALRSAAVKGHHLELYAGAGIVAGSDAAQEWQEIENKAAGLRTLLEEHYTPAVQAG

SEQ ID NO: 93842 - protein, 454 aa, Enterococcus casseliflavus
  REGION 1..454: note = tr|F0EJ42|F0EJ42_ENTCA Isochorismate synthase; OS = Enterococcus casseliflavus ATCC 12755 OX=888066; GN = HMPREF9087_1480 PE=4 SV=1
MNSKSSSNYEAAIAAGKTYLSEYQPLKRCDLLALYAAAQEYQGERYFWRTPDETTSLVGLGWLATFSQPKLADFSEVRSLLKQAHYQPEAPLQAQLVGGFAFDEQAEVSQDWAELGAGLFALPEILVSKTDDQCGVVYTVAASSEEQRQQKVAALQEKVASWLNANPDKSLVAETPAFQAQEELEVPQWLQAVEETVAAIRSTETPLKKVVLARRMKIETKQSIISAGVLQRLAQQQPNTYLFAIEHGGHVFAGATPERLLKATVDQFETVSIAGSAPRGKTKEEDEALAQALLADAKNTHEHQVVVDRLETALATLLADGFQSEARSVIKNRDIQHLFVPLAGQRKAGVNFLSAVQKLHPTPALGGEPKEAAVSWIRTHEPASRGMYGGPIGWLGIQEDIGEFAVAIRSGFFSGNQATLYAGCGIVADSDAESERQETRLKFQPMRRGILGDE

SEQ ID NO: 93843 - protein, 361 aa, Enterococcus durans
  REGION 1..361: note = tr|A0A557YHJ8|A0A557YHJ8_9ENTE Isochorismate synthase (Fragment) OS=Enterococcus durans OX=53345; GN = FNV40_12670 PE=4 SV=1
KEQPVLFGGFPFNKNNRKTEAFWADLSTGYFVLPSVLIKQVKKELNVVITVKKEGKSLKRLFDEVTDWVQILDQLLEKVTPSFPQTQVLLENELDVATFLQSTKESVEEIRDPRNPVEKVVLARQMDLRMEHFSVERLIDNLIRQQANTYIFALETKKRCFVGATPEHLLHASATHFFTASIAGSTTRGKNDEEDRILGEKLLKNSKNNNEHAIVVKKLTKQLANYTEGNLSVSNKKLLKNRDIQHLYLTISGIRKPKVSLFDVIQALHPSPALGGEPKELAKQWLAKKEPSGRGLYGAPIGWCDIMEDIGEFAVGIRSGVFSENAGRLYAGCGIVGDSDPEEERQETQLKFQPMLRGVKE

SEQ ID NO: 93844 - protein, 455 aa, Enterococcus faecalis
  REGION 1..455: note = tr|E6GSP1|E6GSP1_ENTFL Isochorismate synthase; OS = Enterococcus faecalis TX0309A OX=749503; GN = HMPREF9506_00746 PE=4 SV=1
MKLPDELRQAYQKNARQFSWVFPLETEQTALAIFAAGEKAYQGERFFWQTPKKDFALVGFGYETILKGAETETHQLNNFLKKEAATRFQNMSISGTGALLFGGLPFDTEQTPTEAWGELGEGWFYLPSILFTFSGSRIYGTLNFSGSSEQEVEERWSTLVAQFDRLLATCEELPAVAETKIDKEEVAVTEWLQAVNETVAVLREDGPLKKVVLARQLAVSSPEKIRSNQVLVNLMAQQQNTYLFALEAKDTSFIGATPERLLLGTKETFATACIAGTIKTGQTPEETKTLGAQLLQDRKNTGEHQIVVERLAKELAKMTTSENSIQAPIILENRDVQHLYVPISGQRKPGISFLESVMQLHPTPALGGEPKELAVEWIRQYEPGSRGLYGAPIGWISGNDDSGEFAVALRSGVFAGQQGVLYAGCGIVADSQAELEREETKIKFQPMLRGIGGQV

SEQ ID NO: 93845 - protein, 453 aa, Enterococcus faecium
  REGION 1..453: note = tr|A0A4U9PJX8|A0A4U9PJX8_ENTFC Menaquinone-specific isochorismate synthase OS=Enterococcus faecium OX=1352; GN = entC PE=4 SV=1
MTTNLFNLNLQEVPEADYVCYSFKIPYEPLANLFAKASDFKGTRFFWQTPDKNVGFLGFGRNLLKKRGNWSTEDLINAKQEFFKKLSFLVPEKETPILFGGLPFDAENKNQAPIWGELAEGCFILPELLIKQNHQQLTVVITASNHFKTLKELDEFIKEKMRLINEMKERCVPDFSPSQILKETEVAVPHFLKAVEETIEVTANKKSALKKVVLARQMQLVGKEFSVEKILLHLISQQPNTYLFVLEAKGQAFIGATPERLLQATDTHFLTASIAGSIARSSNEREDVTSGEKLLKDSKNIGEHQLVVERLTEQMHSFIKGKLTVSEKSLLKNRDIQHLCLTLKGSRQDGFSFLEVIRQLHPSPALGGVPKQAAIDWIAEKEPIGRGLYGGPIGWCSLTEDVGEFAVGIRSGVVSDTEVQLYAGCGIVPDSTPEAEYLETALKFQPMIRGVKE

SEQ ID NO: 93846 - protein, 458 aa, Enterococcus gallinarum
  REGION 1..458: note = tr|A0A366U2S7|A0A366U2S7_ENTGA Isochorismate synthase OS=Enterococcus gallinarum OX=1353 GN=EB54_02919; PE = 4 SV=1
MNSKSKNEYQHALAAGKKVFSHYYPLAPCDFVQLYAAASQFIGERYFWRSSDQATCFLGIGSVKRYANPSLIDFERQRRTLKKQHFQPNTDQMAATLLGAFAFDEQSQGAAEWGTIGNGLFVLPKILFRKINDVYGVILTVEAKDTNDVETLFGQFADLQQLVEQWGKQAQQPVGACLLQQTELDVPQWVKAVDETVAAIRSAKTPLEKVVLARRMKITTKKEIDSFAVLARLAEQQTNTYLFAFEDEVSFIGATPERLLKATASHFETVSIAGSAPRGSTPAEDQQIADALLTDPKNTHEHQVVVNRLEQALSSLLAEGFHSEARSIIKNRDIQHLFVPLSGKRKPAVSFLEAVAKLHPTPALGGEPKADALAWIRNHEPARRGLYGGPIGWLGIQEDIGEFAVAIRSGVFHGTEGILYAGCGIVADSVAEEERQETALKFQPMLRGVIENESASHD

SEQ ID NO: 93847 - protein, 437 aa, Enterococcus hirae
  REGION 1..437: note = tr|A0A449EIC5|A0A449EIC5_ENTHR Menaquinone-specific isochorismate synthase OS=Enterococcus hirae OX=1354; GN = entC_5 PE=4 SV=1
MTTNLFNLNLQEVPEADYVCYSFKIPYEPLANLFAKASDFKGTRFFWQTPDKNVGFLGFGRNLLKKRGNWSTEDLINAKQEFFKKLSFLVPEKETPILFGGLPFDAENKNQAPIWGELAEGCFILPELLIKQNHQQLTVVITASNHFKTLKELDEFIKEKMRLINEMKERCVPDFSPSQILKETEVAVPHFLKAVEETIEVTANKKSALKKVVLARQMQLVGKEFSVEKILLHLISQQPNTYLFVLEAKGQAFIGATPERLLQATDTHFLTASIAGSIARSSNEREDVTSGEKLLKDSKNIGEHQLVVERLTEQMHSFIKGKLTVSEKSLLKNRDIQHLCLTLKGSRQDGFSFLEVIRQLHPSPALGGVPKQAAIDWIAEKEPIGRGLYGGPIGWCSLTEDVGEFAVGIRSGVVSDTEVQLYAGCGIVPDSSLKRNT

SEQ ID NO: 93848 - protein, 221 aa, Enterococcus italicus
  REGION 1..221: note = tr|E6LE66|E6LE66_ENTI1 Chorismate binding enzyme; OS = Enterococcus italicus (strain DSM 15952 / LMG 22039 / TP 1.5) OX=888064 GN=menF PE=4 SV=1
MFFSLQRNERIFVGATPERLLAGETDTIYTAAVAGSIERGQTADEDQTLGAALLHSAKNLHEHQIVVDRIRKAIAPFTQNQVTVGERTLLKNRDIQHLYAPIVGKRQAKGPTFLDMIDQLHPTPALGGEPKEAALHWLRHQEPVGRGLYGAPIGWLSLAEDGGEFAVGIRSAVLYKQHALLYAGCGIVADSVAIEERAETSVKFQPMKRGISDEDPATNHD

SEQ ID NO: 93849 - protein, 458 aa, Enterococcus saccharolyticus
  REGION 1..458: note = tr|A0A449ERS4|A0A449ERS4_9ENTE Isochorismate synthase OS=Enterococcus saccharolyticus OX=41997 GN=dhbC; PE = 4 SV=1
MNSKSKNEYQHALAAGKKVFSHYYPLAPCDFVQLYAAASQFIGERYFWRSSDQATCFLGIGSVKRYANPSLIDFERQRRNLKKQHFQPNTDQMAATLLGAFAFDEQSQGAAEWGTIGNGLFVLPKILFRKINDVYGVILTVEAKDTNDVETLFGQFADLQQLVEQWGKQAQQPVGACLLQQTELDVPQWVKAVDETVAAIRSAKTPLEKVVLARRMKITTKKEIDSFAVLASLAEQQTNTYLFAFEDEVSFIGATPERLLKATASHFETVSIAGSAPRGSTPAEDQQIADALLTDPKNTHEHQVVVNRLEQALSSLLAEGFHSEARSIIKNRDIQHLFVPLSGKRKPAVSFLEAVAKLHPTPALGGEPKADALAWIRNHEPARRGLYGGPIGWLGIQEDIGEFAVAIRSGVFHGTEGILYAGCGIVADSVAEEERQETALKFQPMLRGVIENESASHD

SEQ ID NO: 93850 - protein, 458 aa, Enterococcus sp.
  REGION 1..458: note = tr|A0A4P9DJW2|A0A4P9DJW2_9ENTE Isochorismate synthase OS=Enterococcus sp. M190262 OX=2582830; GN = FE005_08015 PE=4 SV=1
MNSKSKNEYQQALAAGKKVFSHYYPLAPCDFVQLYAAASQFIGERYFWRSSDQATCFLGIGSVKRYANPSLIDFERQRRNLKKQHFQPNTDQMAATLLGAFAFDEQSQGAAEWGTIGNGLFVLPKILFRKINDVYGVILTVEAKDTNDVETLFGQFADLQQLVEQWGKQAQQPVGACLLQQTELDVPQWVKAVDETVAAIRSAKTPLEKVVLARRMKITTKKEIDSFAVLARLAEQQTNTYLFAFEDEVSFIGATPERLLKATASHFETVSIAGSAPRGSTPAEDQQIADALLTDPKNTHEHQVVVNRLEQALSSLLAEGFHSEARSIIKNRDIQHLFVPLSGKRKPAVSFLEAVAKLHPTPALGGEPKADALAWIRNHEPARRGLYGGPIGWLGIQEDIGEFAVAIRSGVFHGTEGILYAGCGIVADSVAEEERQETALKFQPMLRGVIENESASHD

SEQ ID NO: 93851 - protein, 417 aa, Enterorhabdus caecimuris
  REGION 1..417: note = tr|A0A4S4FYB3|A0A4S4FYB3_9ACTN Isochorismate synthase OS=Enterorhabdus caecimuris OX=671266; GN = E5986_10600 PE=4 SV=1
MGLGRCIALASMRDVEYEYGTGAGSQPYFEAAKPNALDPTIRRTGEFLDAAFSGVHSRAGYADEQPPVFFSFNRFDGTNPAPADDLMASFPQLRFMLPEIVLIENERGRFLQVNSLGPVYPGRVARFQRLVAAAPRRETAFVPVTVESDSRATWQSEMDAALAAITEGRVSKVVLSRRQRVVAARPFSSKDLLVNLIDGDARGTVLLYRYADVFFCGCTPELLVRKQGDHVESMCLAGTCPVGATPEESQVLAEELMADSKNRAEHDYVVQLIRNVLDRVCYAVDVPATPEIMRLAHVQHLFTPARARVLAGVTLADLMEDLHPTPAVAGAPVGEARMLLREIEPYNRGFFAGACGFVDGEGDGEFSVALRTGVFDGEMGWVYGGCGIVAESDAEAEYHEIDLKLRTILSAFGKDAL

SEQ ID NO: 93852 - protein, 417 aa, Enterorhabdus sp.
  REGION 1..417: note = tr|A0A4S2FW73|A0A4S2FW73_9ACTN Isochorismate synthase OS=Enterorhabdus sp. NM05_H27 OX=2516956; GN = E5332_04735 PE=4 SV=1
MGLGRCIALASMRDVEYEYGTGAGSQPYFEAAKPNALDPAIRRMGEFLDLAFSGVHSRAGHADEQPPVFFSFNRFDGTNPAPADDLMASFPQLRFMLPEIVLIENERGRFLQVNSLGPVYPGRVARFQRLVAAAPRRETAFVSVTVEPDSRATWQSEMDAALAAIAEGRVSKVVLSRRQRVVAARPFSSKDLLVNLIDGDARGTVLLYRYADVFFCGCTPELLVRKQGDQVESMCLAGTCPVGATPEESQVLAEELMADSKNRAEHDYVVQLIRNVLDRVCYAVDVPATPEIMRLAHVQHLFTPARARALAGVTLADLMEDLHPTPAVAGAPVGEARMLLREIEPYNRGFFAGACGFVDGEGDGEFSVALRTGVFDGEMGWVYGGCGIVAESDAEAEYHEIDLKLRTILSAFGKDAL

SEQ ID NO: 93853 - protein, 438 aa, Enterovibrio coralii
  REGION 1..438: note = tr|A0A135I8L4|A0A135I8L4_9GAMM Isochorismate synthase MenF OS=Enterovibrio coralii OX=294935 GN=menF; PE = 3 SV=1
MTDLSQAIARLIETLSTATPIKKRLSLPFTWPSDLDPIAWLDAQPIFPKFYWQTRDGDEEVIALGQVKTFADPCSAEKYLASDQRVWGGRSFDGRTERNQRCLQSFFFLPCIELSRRGEDWTVAINLNEEPLKAQAALSKVTHKPRTLSCPECNILASEHSPEFPEWSTMIDHALTTIEATDLQKVVLARKTSLTLDRPLSAAQLMKASRDQNVSNFHFLLALDEKHCFVGSTPERLFERQGQQMKTEALAGTIGRGNNAAHDDELAQWLLNDQKNVYENRLVVDDISARLATCTQSLDIEQTPHLVRLRKVQHLKRDIAGELKDGVPSSTLLEMLQPTAAIAGLPRQQAVDFIVENEPFARGWYSGSVGYLSAEQSEFCVAIRSALVMDDVLHLFAGAGIVPGSQPACEWKELDRKVSTLMSLLKPVPEKTAEKKAG

SEQ ID NO: 93854 - protein, 490 aa, Enterovibrio nigricans
  REGION 1..490: note = tr|A0A1T4USA0|A0A1T4USA0_9GAMM Isochorismate synthase MenF OS=Enterovibrio nigricans DSM 22720; OX = 1121868 GN=menF PE=3 SV=1
MQIPSKWLCFVRLVQSYSLCVTSVAVAGLSEAGISPRSREFCKLVVSFKRGYLTDLSQAIARFIETLSIAAPIEKRLSLPFTWPSALDPIAWLDAQPLFPKFYWQTRDGNEEVIAMGQVKTFSDPQVAENYLAPGQRVWGGRSFDGRTERNHRCLQSFFFLPCIEISRKGNDWSVAININEEPLRAQAALSKVTHIPQRLSEPECNILSSEHSPAFPEWSTMLDRALTTIEATELQKVVLARKTSLTLDRPLSAAQLMKASRDQNVSNFHFLLALDEKHCFVGSTPERLFERHDCEVKTEALAGTIGRGKDTQHDDELAQWLLNDQKNVYENRLVVDDITSRMQVCTENLEVEEAAHLVRLRKVQHLKRDISGVLHADVPSSTLLEILQPTAAIAGLPRQQAVDFIVDNEPFVRGWYSGSVGYLSAKKSEFCVAIRSALVMDNVLHLFAGAGIVPGSQPACEWKELDRKVSTLMSLLKPVPEKTAEKKYG

SEQ ID NO: 93855 - protein, 454 aa, Enterovibrio norvegicus
  REGION 1..454: note = tr|A0A4U1XPG4|A0A4U1XPG4_9GAMM Isochorismate synthase MenF OS=Enterovibrio norvegicus OX=188144 GN=menF; PE = 3 SV=1
MTELIQAIGRLCDALSTLSALPPRLSVDLTLSDHIDPIEWLDAQPLFPKFYWQSRDGAEETVALGQVRTFSNPYSAELVLEDGQRIWGGRSFDGRTERNQRCLQSFFFLPQIELSRVGETWYLSLNTGDDIGKARAALNKLSDSTSTLARPQCDILDAEHSPSYPQWSSMLEKALAEIDSTDLQKVVLARKTSLTLDRHISAAQLLKASREQNSANFHFLLALDEKHSFVGSTPERLFNRQGQALLTEALAGTIGRGKTAQDDKALAQWLLNDPKNIYENRLVVEDIESRLLPNSIALTVEGSPHLVQLRKVQHLKRNIEAELHNDVSSSDLLDMLQPTAAIAGLPRDNAVKFITENEPFARGWYSGAVGFLGRERSEFCVAIRSALVMNDTLHLFAGAGIVPGSEPETEWKELDRKMSTLMSLLSPVLDPLPFEKKRSMLPMSNAIDMEQKAG

SEQ ID NO: 93856 - protein, 430 aa, Erwinia billingiae
  REGION 1..430: note = tr|D8MUS7|D8MUS7_ERWBE Isochorismate synthase MenF; OS = Erwinia billingiae (strain Eb661) OX=634500 GN=menF; PE = 3 SV=1
MSFASALNNLQQQLRAVTASQPGFLRLSATVTDPSDGLAWLDAQPVWPKFYWQHRGGEQTLMALGEVQRAETLQQASQLLRALPAEGCLVGSNEFALQHCCLFLPRVLLRGNTLSVFLHGVLREDAQAAIGLIVSLLPAHPFESLPQRLSACQHFPDSGGWQQQVAAALAAIRQGDLDKVVLARATDLHFTQAVNAAALLDASRQANRHCYHFMLAISPQQAFVGSSPEQLFHRHGLALNTEALAGTCANASDAHLAQQLGDALLNDEKNRRENGLVVEDICQRLESITSGLDVSPAHVVRLRKVQHLKREIQGQLYQQDDMALLQRLQPTAAVAGLPRQPAQQFIRQHEPFSRGWYAGSVGWLSAAESEFAVALRSAQVSGNSVRLYAGAGIVAGSEASLEWQEINQKAAGLASLLGVEIASGSCPKSK

SEQ ID NO: 93857 - protein, 390 aa, unidentified
  source 1..390: note = Erwinia gerundensis
  REGION 1..390: note = tr|A0A0U5GHY3|A0A0U5GHY3_9GAMM Isochorismate synthase EntC OS=Erwinia gerundensis OX=1619313 GN=entC; PE = 4 SV=1
MVETSVFENAFVEDFDAVSRGFFYLSPWRSLWTQGCFSRLTTPVAGAEQPDGAFQCQLRQQFSEAKQQGIQNPIMVGAIPFDASQPSALFIPEASHFFDRQQLAGGFTDTPLPTVTSRTALPDHAAFTDMVAQAVNATSQGELDKVVLSRLMDITTERPVDTAMLMRRIINQNPTSYNFHVPLPDGGSLLGASPELLLRKQNGEFSSCPLAGSARRQQDRQQDNAVGQRLMHSSKDRHEHKLVTDAMRDVLQSRSSLLSVPETPQLVTTPTLWHLATWINGEARDPRDNALSLASLLHPTPALSGFPHARAQKLIAQLEPFDRHLFGGIVGWCNEAGDGEWVVTIRCGTVHNTRVRLFAGAGIVPDSSPESEWNETGVKLDTMLRAFGLQ

SEQ ID NO: 93858 - protein, 391 aa, Erwinia piriflorinigrans
  REGION 1..391: note = tr|V5Z366|V5Z366_9GAMM Isochorismate synthase; OS = Erwinia piriflorinigrans CFBP 5888 OX=1161919 GN=cbsC; PE = 4 SV=1
MESLTSESTLEFATNAAASGFFFMSPWRSLAAQGCFTTITTPASGGNSLDGDFQQEVRQRFSEARRQGIVSPVLVGAIPFDVSQPSSLFIPESSHYFDGKAFRQQMSAHKAGLPEVIRRQAVPEQDEFMLMVSKAVAATGSRQLDKVVLSRLMEIVTAQPVESRDLMMRLIAQNPESYNFHISLPQGGSLLGASPELLLRQCEKRFYTHPLAGSARRERDAQKDSQAGQRLMNSGKDRYEHKLVTDAMRDVLHPRSASLKLPATPQLLTTSTLWHLGTAIEGEVSNKADTALSMACLLHPTPALSGFPHACAQKLIAELEPFKRGLFGGIVGWCDEHGNGEWVVTIRCGKVNGNRVQLFAGAGIVPASTPESEWRETGVKLNTMLSALGLN

SEQ ID NO: 93859 - protein, 393 aa, Erwinia psidii
  REGION 1..393: note = tr|A0A3N6UUE6|A0A3N6UUE6_9GAMM Isochorismate synthase OS=Erwinia psidii OX=69224 GN=EB241_20275 PE=4; SV = 1
MTICNKVGAGCLPVSPGAESFLFTSCWKSLVTEGRLISVETPASQGDKLEGAFQQAVRSAFAAARATGMVRPLLVGAIPFDTRQPSALFIPRHSYFFNRRQWQPAGIPNGGQWPPEATEQRALPEKAAFMAMVAKAAQATARPGLDKVVLSRLIEITTAQPLHPAAVVHRLVALNPGCYHFYLPLADGSSLLGASPELLLRKSGHHFSSLPLAGSAPRDLTSLQQDHDIGARLMRSQKDRFEHQLVTQAMRQLLQPRSLSLDISQQPTLITTPTLWHLATQIEGEVRSEQENALSLACLLHPTPALSGHPHVAARQWITQLEPFDRQLFGGIVGWCDEAGNGEWVVTIRCATLAGNRIRLFAGAGIVPASEPEAEWNETGTKLSTMLKVFGLR

SEQ ID NO: 93860 - protein, 392 aa, Erwinia sp.
  REGION 1..392: note = tr|A0A427KAA8|A0A427KAA8_9GAMM Isochorismate synthase OS=Erwinia sp. 198 OX=2022746 GN=EGK14_05585 PE=4; SV = 1
METLCADAVKPSVSLSSESFFFASPWKSFITTGRFAEITCPAADGDNLHGAFQQQVRSAFAAARAKGITRPVMVGAIPFDTRQPSALFIPERHEAFSRQQPLQAAQQAKSAVEPVITARRNIPEQAEFMEMVAKAAEATAQPGLDKVVLSRLIDITTAEPVQATALMDRLIALNPGSYHFHVPLADGSTLLGASPELLLRKSGETYTSLPLAGSARRDRSDKARDLAVGEKLMYSQKDRYEHRLVTSAMYDVLKPRSRSLAVPDKPEPITTSTLWHLATAIEGKAAAAEETALSLACLLHPTPALSGYPHVAACEWIEKLEPFNRELFGGIVGWCDDEGNGEWVVTIRCGTLAGKNIRLFAGAGIVPASSPESEWRETGVKLSTMLHVFGLQ

SEQ ID NO: 93861 - protein, 380 aa, Erwinia tracheiphila
  REGION 1..380: note = tr|A0A345CSK9|A0A345CSK9_9GAMM Isochorismate synthase OS=Erwinia tracheiphila OX=65700 GN=AV903_10795; PE = 4 SV=1
MFSTIPSGAESFLFTSCWKSLVAEGRFLSVTTPARDGEWFDGAFQQAAREAFATARASGITHPLLVGAIPFDTTQPSALFIPRHTHFLERRLLVTASGHLTLETTGQKAVPEKAIFTSMVVNALKAIETGSLNKVVLSRLIDITTARPLQPAALVNRLIALNPGCHHFYLPLSDGTTLIGASPELLLRKSGRHFASQPLAGSARRNLNSPQRDVEIGQKLMQSPKDRHEHQLVIQAMWQRLQPRSITIHLPSQPVPVTTAQLWHLATKIEGEVASEQENSLSLACLLHPTPALSGHPQVAARRLIAQLEPFDRQLFGGLVGWCDEEGNGEWAVCIRCATLAGQRIRLFAGAGIVSASSPQAEWNETEVKFSTMLKVFGLQ

SEQ ID NO: 93862 - protein, 430 aa, Erwinia typographi
  REGION 1..430: note = tr|A0A0A3Z2B9|A0A0A3Z2B9_9GAMM Isochorismate synthase MenF OS=Erwinia typographi OX=371042 GN=menF PE=3; SV = 1
MPFSSALRQLQQQLRSVIGTHRGFLCLAVPLPDEPDGLAWLDAQPVWPKFYWQQREGKQRLMALGEVQRAETLRQAAELLDSLPAEGCLVGANEFSLRQSYLFLPRLIWHGNTLKVFLHGELQEEAQAALGLIERLRPAKPLPELPRQLLTLQHFPDGEGWRQQVEAALRAIQTGSLDKVVLARATDLRFSQAFSAASLLQASREVNHDCYHFLLSPDARQAFVGSSPERLFHRQGLAFSSEALAGTCASSSDPQRAQQLADALLKDEKNRRENRLVVEDICQRLRPIAREVDVCPAAVVRLRKVQHLRCDIQGLLHKRDDRLLIRRLQPTAAVAGLPRQQAQLFIQQHEPFSRGWYAGSVGWLSASESEFTVALRCGLVEEDSVRLYAGAGIVAGSEAPLEWQEINHKASGLATLLGVEIASESCPKSS

SEQ ID NO: 93863 - protein, 432 aa, Escherichia albertii
  REGION 1..432: note = tr|A0A1X3JYU0|A0A1X3JYU0_9ESCH Isochorismate synthase MenF OS=Escherichia albertii B156 OX=550693; GN = menF PE=3 SV=1
MQSLTTALENLLRHLSQTVPATPGIRVFDIPFPLNDAFDALSWLACQQTYPQFYWQQRNGDEEAAVLGALVSFHSLDEAQRFLRQYPEHTDLRIWGLNSFDPSQGNLLLPRLEWRRCAGKATLRLTLFSESSLQHDANQAKELITTLANIKPLPALHLTTTQENHWPDKAGWTRLVKLATETIAEGELDKVVLARATDLHFTSPVNAAAMMAASRRLNLNCYHFFMAFDGESAFLGSSPERLWRRRDAALRTEALAGTVANHPDDKQAQKLGDWLMADDKNQRENMLVVEDICQRLQADTQALDVLPPQVLRLRKVQHLRRCIWTSLNKADDVVCLHQLQPTAAVAGLPRDLARQFIAQHEPFTREWYAGSAGYLSTQQSEFCVSLRSAKISGNVVRLYAGAGIVRGSDPEQEWQEIDNKAAGLRTLLQIEQ

SEQ ID NO: 93864 - protein, 431 aa, Escherichia coli
  REGION 1..431: note = sp|P38051|MENF_ECOLI Isochorismate synthase MenF; OS = Escherichia coli (strain K12) OX=83333 GN=menF PE=1 SV=4
MQSLTTALENLLRHLSQEIPATPGIRVIDIPFPLKDAFDALSWLASQQTYPQFYWQQRNGDEEAVVLGAITRFTSLDQAQRFLRQHPEHADLRIWGLNAFDPSQGNLLLPRLEWRRCGGKATLRLTLFSESSLQHDAIQAKEFIATLVSIKPLPGLHLTTTREQHWPDKTGWTQLIELATKTIAEGELDKVVLARATDLHFASPVNAAAMMAASRRLNLNCYHFYMAFDGENAFLGSSPERLWRRRDKALRTEALAGTVANNPDDKQAQQLGEWLMADDKNQRENMLVVEDICQRLQADTQTLDVLPPQVLRLRKVQHLRRCIWTSLNKADDVICLHQLQPTAAVAGLPRDLARQFIARHEPFTREWYAGSAGYLSLQQSEFCVSLRSAKISGNVVRLYAGAGIVRGSDPEQEWQEIDNKAAGLRTLLQME

SEQ ID NO: 93865 - protein, 431 aa, Escherichia fergusonii
  REGION 1..431: note = tr|F0JWC4|F0JWC4_ESCFE Isochorismate synthase MenF; OS = Escherichia fergusonii ECD227 OX=981367 GN=menF PE=3; SV = 1
MQSLTTALESLLRQLSQSFPVAPGIRIFDIPFPLKDAFDALSWLASQQTYPQFYWQQRNGDEEAAVLGAITHFTSLDQAQRFLHQHPEHADLRIWGLNAFDPSQGNLLLPRLEWQRCGGKATLRLTLFSESSLQHDAIKAKEFIATLVSIKPLPGLHLTTTREQHWPDKTGWTRLIELATQTIAEGELDKVVLARATDLHFASPVNAAAMMAASRRLNLNCYHFYMAFDSENAFLGSSPERLWRRRDKALRTEALAGTVANHPDDKQAQQLGEWLMADDKNQRENMLVVEDICQRLQADTQTLDVLPPQVLRLRKVQHLRRCIWTSLNKADDVICLHQLQPTAAVAGLPRDLARQFIARHEPFTREWYAGSAGYLSLQQSEFCVSLRSAKISGNVVRLYAGAGIVRGSDPEQEWQEIDNKAAGLRTLLQME

SEQ ID NO: 93866 - protein, 391 aa, unidentified
  source 1..391: note = Escherichia marmotae
  REGION 1..391: note = tr|A0A370V3R3|A0A370V3R3_9ESCH Isochorismate synthase EntC OS=Escherichia marmotae OX=1499973 GN=entC; PE = 4 SV=1
MDTSLAEEVQQTMATLAPNRFFFMSPYRSFTTSGCFARFDEPAVNGDSPDSPFQQRLTALFANAKSQGIKNPVMVGAIPFDPRQPSSLYIPESWQPFSRQEKQASARRFTRSQSLNVVERQAIPEQATFEQMVARAAALTATPQVDKVVLSRLIDITTDAAIDSGVLLERLIAQNPVSYNFHVPLADGGVLLGASPELLLRKDGERFSSIPLAGSARRQPDEVLDREAGNRLLASEKDRHEHELVTQAMKEVLRERSSELHVPSSPQLIATPTLWHLATPFEGKANSQENALTLACLLHPTPALSGFPHQAATQVIAELEPFDRELFGGIVGWCDSEGNGEWVVTIRCAKLRENQVRLFAGAGIVPASSPLGEWRETGVKLSTMLNVFGLH

SEQ ID NO: 93867 - protein, 431 aa, Escherichia sp.
  REGION 1..431: note = tr|A0A5F1HHQ9|A0A5F1HHQ9_9ESCH Isochorismate synthase MenF OS=Escherichia sp. E2562 OX=2041646 GN=menF; PE = 3 SV=1
MQSLTTALENLLRHLSQEFPATPGIRVFDVPFPLNDAFDALSWLASQKMYPQFYWQQRNGDEEAAVLGTIASFSSLAQAQRFLRQHPDHTDLRIWGLNAFDPSQGNLLLPRLEWRRCAGKATLRLTLFSENSLQQDAHQAKEYIAALANIKPLPALHLTIIQENHWPDKSAWTGLIKLATDTIAEGELDKVVLARATDLHFSDSVNAAAMMAASRRLNLNCYHFYMAFDGESAFLGSSPERLWRRRDKALRTEALAGTVANHPDDKQAQQLGEWLMADDKNQRENMLVVEDICQRLQSDTQALDVLPPQVLRLRKVQHLRRCIWTSLNTADDVVCLHQLQPTAAVAGLPRDLARQFIARHEPFTREWYAGSAGYLSLQQSEFCVSLRSAKISGNVVRLYAGAGIVRGSDPELEWQEIDNKAAGLRTLLQLE

SEQ ID NO: 93868 - protein, 340 aa, unidentified
  source 1..340: note = Estrella lausannensis
  REGION 1..340: note = tr|A0A0H5E4J4|A0A0H5E4J4_9BACT Putative menaquinone-specific isochorismate synthase OS=Estrella lausannensis OX=483423 GN=menF PE=4 SV=1
MLDKEGFGKCASLIECDDGFLIGTGKRQWRGEPNPFKPAFFFPPFFLNCEDPFCVHQETFFLDKCAFQAFLNSAQHREEERFVWSRPEKEPYQLQFNLLRKQIESGQLQKGVPYSRRQSIGTIDSGRIFSILRSAFEKRGRGLLYGFWNADDGMLGVTPEKLFVRKDGTIYVDAVAGTRPTPDFKEKESVEHTLVTQGIKEALTPYGEVAVGQTCPIPYGKLLHLYTPIEVKARAEAPFKELVEKLHPTPALGTYPQKEGAAWLMEADRLIPRRRFGAPAGCIIPERGEARCLVAIRSIQWNDGNIEMFAGGGVTDESEVEKEWDEIQSKFQSIEQMLSV

SEQ ID NO: 93869 - protein, 471 aa, unidentified
  source 1..471: note = Euhalothece natronophila
  REGION 1..471: note = tr|A0A5B8NK91|A0A5B8NK91_9CHRO Isochorismate synthase OS=Euhalothece natronophila Z-M001 OX=522448; GN = FRE64_02680 PE=4 SV=1
MSVTPCYARRLADPDHLHHFLQDCHKKCQQRHQSFIISVTQPLSLVEPLAILQQLNFREERSFYWETQQPKSAIAAWGICQEKNITGTNRFQQTQDFIDNCKDKIIELKHSQLSEAGLKFLTNFSFFSTSSYQGHFPSVTIFIPRWQVSRADNTCFLTYNFLLSHNSNIATIESKLSNKIEEIEKVGNSIITFPFSLSSPFQKSELQDSSQFKSAVKLALKDIERQELTKIVLAHHLDVVSPVSFSPYLSLHYLRQRYPHCYIFSVSNGEGTTFLGATPERLFSLRKQHLISDAIAGSAPRGKTEKIDHQFAQNLLASEKERREHQAVSCYIIKQLEALGLTPQRSRRQLLKLSNIQHLWTLIESQVPNNINPIEILAKLHPTPAVAGVTTEVACEKIGQYETFDRALYAAPIGWLDTQGNAEFMVGIRSAMINKNQARLYAGAGIVAGSNPDKELAEIQLKLQTMLKALQ

SEQ ID NO: 93870 - protein, 404 aa, unidentified
  source 1..404: note = Euryarchaeota archaeon
  REGION 1..404: note = tr|A0A3M1TYQ6|A0A3M1TYQ6_9EURY Isochorismate synthase OS=Euryarchaeota archaeon OX=2026739; GN = D6732_26775 PE=4 SV=1
MIQAILKSPIYPKIIYIEEERIQIALGANERKYPRSLLMVNEFIEKLKKKYERPFQIFGVLPFDFSVEGTIWEGLPPSIMVLPQWQFEWDNGKVTIKWAENETEAHMMMDKLLRETVVEIGDSKSEEKLHFQDIPMEEDWKRLVTEAIEDIKANKYQKIVLARAKSSTIPKGKQIDLAKTFLSLHENYPKCLTFLISLDKEHTFFGSTPETLGKKEGEVFQTMALAGTVPVSEGEQQARNLLLGTKKLTDEHKIVVESIVEQLKKVSKQQTISQPEILRLKNVFHLHTPIRSILKSDIPWYELIKVLHPTPAVGGRPRDIAISKIRSMEKWSRGWYTGLLGWVDHQGDFDLRVALRCALINHDIIWVFAGAGIVDGSEPVSEWEETESKFQPVLNSLVLTEVEK

SEQ ID NO: 93871 - protein, 459 aa, Ewingella americana
  REGION 1..459: note = tr|A0A085G950|A0A085G950_9GAMM Isochorismate synthase MenF OS=Ewingella americana ATCC 33852 OX=910964; GN = menF PE=3 SV=1
MAVKQISAILDQLDTALLGTFPDAAGLRQFTYRLPEQPHGGMLEWLDAQPCYPKFYWQQRDDAEEVVLCGDAANFSDMPTAQRFLQQYSDFPELRVWGLNAFNDGMGGAQASHVLFLPRIEITRRDGQCNLRCQLYSPVSLREEADKMRAFLRTLVNSRPLPALKSQVVRYQHLPTQPQWARMIDAVLSGIKQHQFDKVVLARKTTLALSQPLNPASFLAASRAVNHHCYHFMLAFAPQQAFLGSSPERLFLREKRQLFTEALAGTVAAADDHQQARALGQWLLNDPKNQRENMLVVDDICQRLQGGARSLDVMPAEILRLRKVQHLRRSIQAVLAKADDADCLQRLQPTAAVAGLPRQAAREFIARHEPFDRQWYAGSAGYLSLTRSEFTVALRSAAVKGSQLELFAGAGIVAGSDAAQEWLEIENKAAGLRTLLDEGASSAESAEPQYPELPAVRAG

SEQ ID NO: 93872 - protein, 461 aa, Exiguobacterium aurantiacum
  REGION 1..461: note = tr|A0A377FW05|A0A377FW05_9BACL Isochorismate synthase dhbC OS=Exiguobacterium aurantiacum OX=33987; GN = dhbC PE=4 SV=1
MPDTQTHIKQRIEQAHKRARAWQRPVLASYTWEIPSFDAFHIIQNTETSHYYFASPDRTLEMLGCADALVLSASGPERFQRLQYDWSLHRRDVDATIYAFSGFSFDTFVRPQKNMWEAFGEASLVVPKFLYRRLGDKHTLTVSTLVSAKRSVEQYLIQLADQLAQFNALHAPDTEKPTYSQVKDGVDHFKSSFQQAKQYINEEKVEKIVIAREEIYQMSDEAFPFAQTLRHLSDQQLGSYVFLYQPKREIGFFGATPERLLKKQGPYIETAAIAGTMKRPDTDSEAEIAKAQLLQDRKNLEEHQIVVKAIKNALNPYAATIKAPESPQVLETRSVYHLHTPIQATLDTNASILSIIESLHPTPALGGSPKRMSVRLLRDIERFDRGWYGSPFGWLNTDGEGEFVVAIRSALVHHQFVAMYAGCGIVQESELESELEETEMKLSPIKQALGFHPVAPGGNPS

SEQ ID NO: 93873 - protein, 461 aa, Exiguobacterium sp.
  REGION 1..461: note = tr|A0A4R0ZSI6|A0A4R0ZSI6_9BACL Isochorismate synthase OS=Exiguobacterium sp. IPBC4 OX=2510946; GN = EVJ17_11550 PE=4 SV=1
MPDTQTHIKQRIEQAHKRARAWQRPVLASYTWEIPSFDAFHIIQNTETSHYYFSTPDRSLEMLGCADALVLTASGPERFQRLQYDWSLHRRDVDAVIYAFSGFSFDTFIRPQKNMWEAFGEASLVVPKFLYRRSGDKHTLTVSTLVSAKRSVEQYLIQLADQLAQFNALHAPDEQAPTYSQVKDGVDHFKSSFQQAKLNISEERVEKIVIAREEIYQTSEEPFPFATTLRHLSEHQTGSYVFLYQPKREIGFFGATPERLVKKQGPYIETAAIAGTIKRPDTEIEADVAKQTLLHDAKNLDEHQIVVKDIKNALTPYAATIKAPETPRILENRSVFHLHTPIQATLDTNASLLSIIESLHPTPALGGSPKRTSVRLLREIERFDRGWYGSPFGWLNTEGEGEFVVSIRSALVHHQFVALYAGCGIVQESELEAELAETEIKLSPIKQALGLDKVSAGGNQA

SEQ ID NO: 93874 - protein, 463 aa, Falsibacillus pallidus
  REGION 1..463: note = tr|A0A370GL34|A0A370GL34_9BACI Isochorismate synthase MenF OS=Falsibacillus pallidus OX=493781 GN=menF; PE = 3 SV=1
MAIIQQSKINNAFMKAKQENRQVLFSSTIEVQNAVDPLTFFKNGKEKYRGERFFWKDSSNELILAGIGVEKSFQYNEVDHRFFEAESEWKRLIDDAVIDNPSDIPGTGPLLFGGYSFDPLSEKEEEWADYAASQFYLPRHMLTISQGKKYLTVNILCMPNNEEESAIQTDINDLLSMGEKVQGMKSGEEASIEEINKEAWIQAVEDVIEKLRAGELQKVVLARKIKAVFKETIKPPNVLEALLNEQPDSFTFAFESGESCFIGASPERLIRKNGSKVLSTCLAGSIRRGTADEEDNRLGLELLNDQKNLQEHAFVVRMIESVFAKYCKDVEIPEGPTLLKLRDIQHLYTPVVGTIDEETPLSALIQSLHPTPALGGEPREKAMEVIRQKEKMDRGLYAAPIGWFDYRGNGEFAVAIRSGLLKNNEAFLYAGCGVVADSDPLSEYTETRIKLKPMLRAVGGIES

SEQ ID NO: 93875 - protein, 445 aa, Falsibacillus sp.
  REGION 1..445: note = tr|A0A3L7K639|A0A3L7K639_9BACI Isochorismate synthase OS=Falsibacillus sp. GY 10110 OX=2478915; GN = D9X91_00120 PE=4 SV=1
MEILFSTTMEIQDADGPLAFFEYGNEKFNGERFLWKDSQNHAVLVGVGIEKSFSHERTDHNRFFEAETEWKRFIDRAVIENPFEVPGTGPLLFGGFSFDPMSEKETEWAAFADSLFYLPKFMLTISQGKSYLTVNVACDPNDDLGAVTEIENFQMGYMQFQQKRSIQSPIISDMEEINKEEWIAAVADVVRQLKQGDVDKVVLARKMKVHFDEPILTEMVLQNLWQQQPDSFIFALEALESCFIGASPERLIQKTNNTVFSTCLAGSIARGKETREDELLGKELLNDRKNLHEHQLVVKMIVEVLKKHCIDIQIPENPALLKLRDIQHLYTPVTGTVDGNLSITKLVEALHPTPALGGVPRQRAMHIIREKEQMDRGMYASPIGWMDYRDNGEFAVAIRSGLIKQDEAVLYAGCGVVADSDPQSEYIETKIKFRPMYRAIGGTEE

SEQ ID NO: 93876 - protein, 356 aa, unidentified
  source 1..356: note = Fermentimonas caenicola
  REGION 1..356: note = tr|A0A098C2M9|A0A098C2M9_9PORP Isochorismate synthase OS=Fermentimonas caenicola OX=1562970; GN = EWM46_02540 PE=4 SV=1
MTLKNSYQKLDSLIENDACFAIYRLPNESSPKFVMQNNGEIKHFYDIEELEENRGFVIAPYKIKKETPVLIIRPDCTNLNDAVIPDRQNPGVGSERFKLDNINRNDYNRLFDLFYMPLKDGTLKKVVLSRSKSFARNRNFSPGASFYKAMEKYKNSYVFLFHTPISGTWLGSTPEILLSGRGNSWHTVALAGTQYQVKEKISWDDKNLREQHLVTSYLLNQLSSFNIKPEINGPYTTKAANLAHLKTDLDFTLPENVGLGKLIKSLHPTPAVSGLPKEEAFGYIDMYEGYDRRYYTGFIGMMNKSSDTNLYVNLRCMEIGKSLLTLFAGSGLVTSSNSRDEWKETEQKLKTMASIC

SEQ ID NO: 93877 - protein, 383 aa, Ferrimicrobium acidiphilum
  REGION 1..383: note = tr|A0A0D8FUA3|A0A0D8FUA3_9ACTN Salicylate biosynthesis isochorismate synthase OS=Ferrimicrobium acidiphilum DSM 19497 OX=1121877 GN=pchA PE=4 SV=1
MRFLAGLSMVGSFGAGLLYGFITSLEAHHIPFQLVEAAGSLYVGVGQPVLCASDPGISQPGPCFLSSGFLVSESFQVRSYPVVLVAGRDRLEVDVYEAHPRAASELGIFGLASDVRIVAGGALLQGDRVHDLEATSRRIQLAKLAIDQGQLTKLVVAGHATQEVTERFSIGGALSRLKKAHPASHLYCVDGFFGASPELVAAKSGNLLSLRPLAGTALRGGQVALLNSSKDLFEHRLMVEQLCDDLGGFVKELDRPARPVLFDAGRLIHLATPMRGRLLPGVTLADVVLAIAPTAAVSGVPRISAVEMLRELEIFRGKYAGIVGLTDPFGDGEVYLSIRGASVVDGRLDLVAGAGIVADSQVDSEVAEIEAKIDVVTRALSAR

SEQ ID NO: 93878 - protein, 436 aa, Ferrimonas balearica
  REGION 1..436: note = tr|E1SVA5|E1SVA5_FERBD Isochorismate synthase MenF; OS = Ferrimonas balearica (strain DSM 9799 / CCM 4581 / PAT); OX = 550540 GN=menF PE=3 SV=1
MAQLECQPPGHLCLQLSEPLDAPPLIAWLANQSELPRIYWRGRRDGEEIAAIGAALDLHFDTLPSAEELDRLYNKYLGAGQDTQLRLYGGHAFDTQQPAWPDFGQARFVLPRIEIRRHGEQAQLLLNLCGQERPWQQELERARTALDAIQSAAPLSPLGPAHVLARQDTPDQPRWRELVEQITDPAFLAATPKVVMARETRLTTSALPNHWTVLHAWQLLNPGSYQFGFQFTDSHSFISCTPERLFHRHGRELSTEALAGTTTRGFTEAEDEALANALLADGKNSNENLLVRQLIEQQLGPLSDYVGSEETPTILKLNHIQHLHRSIRAELKAGVNDLQLLGALHPTPAVGGLPRESAMSFIRQREGFARGWYAGACGYFGAHETEFAVAIRSARFESERVTLYAGAGIVAHSEADAEWQELNNKLTTVLGILNGL

SEQ ID NO: 93879 - protein, 452 aa, Ferrimonas marina
  REGION 1..452: note = tr|A0A1M5ZBA2|A0A1M5ZBA2_9GAMM Isochorismate synthase MenF OS=Ferrimonas marina OX=299255 GN=menF PE=3; SV = 1
MTELSLTAAVERLRLRLDQLQLHRPAFRCLQLSEAVDAPPLIAWLAAQQQLPKVYWRGRRDGEEIAAIGAAQDLYLPQMPSTERLDRLYGDFLRADNHEDLRLYGGIAFDPKQPAWPEFGQARFVLPRIELRRQQQEAEIRLTLCGNAEDWEAELAQARQALDDLDRVAPLPPLGPAHVLQRADTPQWPRWQDLVQQVTHPSFAEDTPKVVLARESKLQTSALPNPWTVLHAWQLLNPGSYQYGFQFAPGHTFISCSPERLYHRLGRELSTEALAGTTTRGFSEAEDQALANALLNDGKNSHENQLVREHIEQQLTPLSEYVGVEESPTILKLNHIQHLHRGIRAELKAGVNDLQLLQALHPTPAVGGLPRDPAMSFIRQREGFERGWYAGACGYLGSHESEFSVAIRSARFAPDHVTLYAGAGIVSDSDAEAEWQELNNKLTTVLGILNGL

SEQ ID NO: 93880 - protein, 450 aa, unidentified
  source 1..450: note = Ferrimonas sediminum
  REGION 1..450: note = tr|A0A1G8XE98|A0A1G8XE98_9GAMM Isochorismate synthase MenF OS=Ferrimonas sediminum OX=718193 GN=menF; PE = 3 SV=1
MEKLSLPTAIGRMQTRLAQLAHVQPEHPIVQITESIDATLLLPWLAAQTQWPKIYWRERNQGEQVAALGQCQCVRIDEQPQQQLNQFYQTACSHNLSGVRWYGGVAFDTKQPEWSAFGQATFVLPRLEIRQTDQSTQLLLNLKGEAECWLDELSDANDCLRRLCRIQPLPPLAPGHILSRQDTPSEARWHELVAQVTEPEFNADTPKVVLARQSQLQLSHQPNPWTVLHAWQRLNPNSYQYGFQLTPTASFISCSPERLFLRRQQELSTEALAGTTVRGFTEQEDARLAQSLLDDSKNQNENQLVRVLIEKQLQPLCDYVGTEESPSILKLNHIQHLHRTIKAEVKTGVNDLQLLQALHPTPAVGGLPRENAMTFIRQREGFSRGWYAGACGYFNCLGSEFSVAIRSALFSDNQITLFAGAGIVADSDPSAEWQELENKLATIMGILNGL

SEQ ID NO: 93881 - protein, 450 aa, Ferrimonas sp.
  REGION 1..450: note = tr|A0A4U1BBG8|A0A4U1BBG8_9GAMM Isochorismate synthase MenF OS=Ferrimonas sp. IMCC35001 OX=2569538; GN = menF PE=3 SV=1
MDKPSISIAISRMQTRLAQLANRQPEGDKVQLSESIQPTLLLPWLAAQEMWPQIYWRESNQGEQVAALGACGQHRIDAHAPQKLSEFYERCCRNNHSGLRWYGGVAFDTRQPAWDIFGQAQFILPRLEIRQGEREAQLLLNLNGDPERWLQELTRAAAFLEQVRAIKPLPPLAPGHILSRQDTPSESHWHQLVTQVTEPEFNRDTPKVVLARQSQLQLSHQPHPWTVLHAWQLLNPNSYQYGFQLTPKDSFISCSPERLFQRSQQELTTEALAGTTVRGFTPEEDDALAQALLDDDKNQHENQLVRLQIEKQLQPLCDYVGTEESPSILKLNHIQHLHRTIKAEVKYGVNDLQLLQALHPTPAVGGYPRESAMTFIRQREGFSRGWYAGACGYFNCLGSEFSVALRSARFSGDTITLFAGAGIVAGSDPDAEWQELENKLATIMGILNGL

SEQ ID NO: 93882 - protein, 429 aa, Fibrella aestuarina
  REGION 1..429: note = tr|I0K5R0|I0K5R0_9BACT Isochorismate synthase; OS = Fibrella aestuarina BUZ 2 OX=1166018 GN=entC PE=4 SV=1
MIASSAKPTARQLAPSLSHIWQTALDTNQPAALWRLPNQTDKRLIVHLGDKLTEQPIDLDELRPGFAIGLFDNPTDPNREEMAKAFYLHADLQYTIDGNGQVEPKRDVPTASLNPLADAFQVRVRAAMQAGQEPRPSGAGSLSAIEFTETTQPDAQRNFEDAVAEAVRAMQAGKFWKVVISRTKTIEFAEQPDVTILFDRLCAAYPAAFVSAVWLPEGTGGAPAQIWLSATPERLVSVEADGVFRTVALAGTQSAYYPDGTLKRTADALWSQKEIEEQALVSRYIIGCFKKIRLREYVEEGPKTAQAGNLMHLCTQYTVDTNAVNFPQLGTVMLRLLHPTSAVCGMPRPEALHFIQTHERHDRRFYAGFAGPVNIDAASHLFVHIRCLKLEGKTATLYAGAGLTEDSDPQKEWLETEMKCQTLLRGMRG

SEQ ID NO: 93883 - protein, 425 aa, Fibrisoma sp.
  REGION 1..425: note = tr|A0A418MH67|A0A418MH67_9BACT Isochorismate synthase OS=Fibrisoma sp. HYT19 OX=2305895 GN=DYU11_00060; PE = 4 SV=1
MQSDLSTITVTAPHTVAEPTATHFWESARQLGCPAALWRLPNQQDKHLIIHLTDVLPRVSADLEELPAGFAVSPFDNLDNGPDNPARTLFLRADVHVVFSEGTITHLNYAAGNKAEALRQSVAEQANRPRKPRPTRIAGKTIADGDAQQLYEQNVAEAVAEMQQEHFRKVVLSRTKRVEFDHTPDVVALFDKLCLAYPTAFVSAVFLPERGQVWISATPERLVSVDDKGVFRTVSLAGTQSAFDAAGQPKRPSEAMWSQKEIEEQALVSRYIIECFKKIRLREYLEEGPKTIVAGNLMHLGTRFTVDTQAVRYPQLGTVMLRLLHPTSAVCGMPRDVAYDFIRTHEPHDRELYSGFLGPVNVTTEHSGPESHLFVHIRCLKLEGNVATLYAGAGLTEDSVPEREWQETEMKCQTLLNVLATQKDS

SEQ ID NO: 93884 - protein, 461 aa, Filibacter sp.
  REGION 1..461: note = tr|A0A3P5X4Z1|A0A3P5X4Z1_9BACL Salicylate biosynthesis isochorismate synthase OS=Filibacter sp. TB-66 OX=2483811 GN=pchA PE=4 SV=1
MNRKLTASHDNQVEINKSDLRFFTETIDAGRISPLAFFEAGNSCYIDERFYWQNADKTLTLVGLGHATILESESGKERFEHISKEWDILRAALIKEEKDMEPVLFGGFSFDPQSRKDSEWDAFPSAHFVVPSFQLTIKNGNTTIAINLITKNGGAVDEFEKLREERDRLIHIAQVDEFELLAKPEVVSIEERKKEQYLDAVQHVTEKIKDGDAKKVVIARSIKLNFEEEVPTVTALHHISNEQQESYHFGLEKNGQLFFGATPERLIEISNGRAYSSCVAGSIKRGKSAMDDRKLGKELMDDRKNREEHQYVVNMISQVFSKFCTDISIPKKPKLMKIRDIQHLFTPLEGNVEQKTDIFSLVEALHPTPALGGVPTDVSMDMIREQEQMDRGYYAAPIGWTDTAGNGEFAVAIRSALLKGSHAYLYAGGGIVADSEPEKEYDETWVKFRPVMRALGGKMNG

SEQ ID NO: 93885 - protein, 461 aa, Filobacillus milosensis
  REGION 1..461: note = tr|A0A4Y8IJN3|A0A4Y8IJN3_9BACI Isochorismate synthase MenF OS=Filobacillus milosensis OX=94137 GN=menF; PE = 3 SV=1
MLKTKQLTINEQLNKVKDQLSDGEQKNVSVIEEINEINPVDFFAAFEATDMHRVFWKDVTENIYFVGIGAHEKFQTNTQDRFQSMKEQWDKYVQNVQVAIDAVKGTGPILLGGFSFNQNISSEKWKKFRPGMMVLPEMMLTVNEEGCYMTYNLSITSSTNVSRTVRELKRWKHQISGLNDNQDSQTVKSTKSLDYRNWNQLILDAVETIKSGKLGKVVLARELEAEFNQDINLKEVLKRLDEDETDSYIYIFDLGQDSFISVTPERLVSVRENELLSTCLAGTISRGETEEEDDVLAWSLLNDEKNLSEHQYVVNMIKEAIEPLTKSISIPDKPVIYPLRSLQHLYTPVKATMKETISIFDLIEKLHPTPALGGEPRELAMEFISSHEPFERGWYAAPIGWVDYQGNGEFAVAIRSALISKNEATLFAGCGIVEESDPEAEYEETKLKFTPMLEALGGVSR

SEQ ID NO: 93886 - protein, 504 aa, unidentified
  source 1..504: note = Firmicutes bacterium
  REGION 1..504: note = tr|A0A418MLY2|A0A418MLY2_9FIRM Isochorismate synthase OS=Firmicutes bacterium I2511 OX=2048547; GN = D2Q93_01230 PE=4 SV=1
MAALNSTFPGLRTQWPEGVELRPWLLEVANLAAQQAAKLQQRVTGSVTLSLPAWPEDLLDRLIRSTSGLETGTHQGFYGVYPVRGLRLVTWGCVDQLTATGTQRVKDLADLLRDASAAQVWLHQPPQWFGGFSFAPGPRLGPWQNWPDAILTLPQLSWVDTPQGVWLTVNLALTPGQSPQEAVANTVAAYQSLRQISAVAGLNRLNHTAQVVAGRTQTNGPFPPWSDELEHQTFVSGVEQCVADIRMGQYEKVVLARREQIVGDAREGLQKAAKTLEQAYPNSFTYLLRQANSWFIGASPEQLVRVVDGELLADCLAGTAPRGKDEVADEQLGQGLLNSVKNRHEHAIVRTWICSQLKDLTSEVQAPEIPQLRKLTNVQHLHTPIRARLRASVGALDVAARLHPTPAVAGVPQTAAMAAVLRQEPFDRGWYAGGVGWVDVRGNGEFFVALRSALLESSTAWLYAGAGIVDASDGEEEWAETELKLTPMRTALAWHKEDADSAGK

SEQ ID NO: 93887 - protein, 471 aa, Fischerella thermalis
  REGION 1..471: note = tr|G6FY06|G6FY06_9CYAN Isochorismate synthase; OS = Fischerella thermalis OX=372787 GN=FJSC11DRAFT_3755; PE = 4 SV=1
MTVSPCAADFCVYNRELYQFLVAAQRKSIKNNSTQIASISLEINLVDPLVVLNKLAQPHQLNFYWENQSKKEAIAAIGAVAKLQLQGKERFSKSEGFIKYCLKNIINFATTERTFSKPLFFCGFSFFDINKQENYPFPAATVFLPRWQIAVKEECCILVANFSIHADVNIEKILQILWRKIEIIHSWEFYSPHQNFQEPKFSKKSVANPEKFKSSVLSALETIRSTHVSKIVLADALDVRSNTPFDLFNSLHNLRQLHPNCYIFSTSNGKGQNFIGASPERLICIHNQQLITDALAGSAARGKTPAEDATNADRLLNSEKERHEHSLVIDFITQRLSQLGLLPQILPPRLRQLSNIQHLWTPISAIVPDEVHPLKIVSQLHPTPAVAGTAPDAACVEIRRYESFERGLYAAPLGWVDADGNCEFIVGIRSALIDGDRARLYAGAGIVAGSDPEKELAEIQLKLQALLKALV

SEQ ID NO: 93888 - protein, 2017 aa, unidentified
  source 1..2017: note = Unknown
  REGION 1..2017: note = tr|A0A1Z5JQW7|A0A1Z5JQW7_FISSO Isochorismate synthase / 2-succinyl-5-enolpyruvyl-6-hydroxy-3-cyclohexene-1-carboxyl ate synthase / 2-succinyl-6-hydroxy-2,4-cyclohexad iene-1-carboxylate synthase / O-succinylbenzoate
MQRALDVLSSSSNSENDTLYRLEMTFSRRLQLLPWLKHQLKYDPEQHFFYLQTATDDAEEIVAWGIQQAVDHTSALWDDHRQLPLHARWYGAQTFDGNMAQWVLPMLEWRQNVTHTVLALHTTGTREEAARIAQSINTRHLDDEWTIPTPLPPVVSKTDLAIDAYEQGVEEAIALMQQEKQNGEYSDLQKVVLARQQLLQFKHPFHVVDLLQRWKQESGTGNLFAMALWDEKDDNTIITSTRSSSCFVGCTPEQLFRIHNSTVTTEALAGTRPRGSHPQEDADLLQELVNSPKDLDENACTARYIEEVLSKQEPSIGPFVTSQTFVRRTRHLQHICRTYQAPVWNNTSTLIRNLLEQLHPTPAVCGLPLNMASDYIRRVEPFSRDYYAGPIGYLSSTESQLLVGIRSAVLRPKQELLLTAGSGLVLNSTLREEFAETVAKFQVVASWFSSPLSLQSCPNINTAWATAVVEEFVRCGVDMVFVCPGSRSTPLAVAWAWARRQHPFLRVISCHDERAAAFRAVGYGKASGRPAVVVTSSGTAVANLLPAVLEAHQDDAPMILLTADRPSEHRDISANQAMDQVKLFGDKVAWFRDILPPSDEVNVVAALSDANFAHNMALEQQQPVHINVQFRENLAPEGGPVRGGDGDAVESYNATRFTQGPAFARWSGSGQPLIQRHSSSTQNNDVAAANLVQWLRNSRRGLLVVGQIPPSQQDEVYPLLDQLAQTIGFPILATSSSLRFTSHAVVWFAEHLLSCPNVREAVQPDFILQVGAPLLSTTITSYLKQTAQHVILQTNARRRIDPEYSVTHSISTPNMAYFLESLILRTSELPKGSISSALTPLVPWSRTLAPVMKELLLQQSPDRLTEPQIILALAQKSLPQALFLSNSMPIRDAESFLYPYGEIKRTVPLTVTGSNRGVSGIDGIIATAQGFALNAAEPTQLIIGDVSALHDLNSFAFSSARKLSTLIVNNNGGAIFSFLPVAQHDVSFEEFFSTPTQHVDWEATARGLSVQYKKVATYEALMNQWEQQSVNTLVEAVVISREENVQLHRDLTKKIQSHVSEHFWLDSTTRPKVLPLKRYTSNNANRTLLLLHGWMGCKEDWDDVVEELLVHVGDDWNIVSIDLPGHNHLVPSIESISSTTSGLNYSVSAMAEWIGDCLAQHYQLREVNAVAGYSLGGRIGLELSRLYSIPQVTTISSSLEPIPVDDSGRAQRDDKLSQQLQNIFQQQLVAANPTTMWGEFLESWYSAPIWGHLKERRPDTYRAILERRTAILQRAGASIAQVLSEASPGRPENRRCEQDYFDRRHSLLIGELDSKYSLQSNATLISESGHALLWESPKTIALHLAEFLSCNGTSKNGDASRNNATVFVGNNRSSTAETLDVTIATTSSGNEKSKESSILKDGQREGLLIVESLDYQVFSIQLLKDRNQGLGWGASAAASSTMQNRTGMIIELRAFNYVGLGEVSPLKGVHDESLEQAQVQIQILQERLKLDSPSISLIENIDALLDAWEQLLNETWYTSVRFGLEMALRSLLWHANGMLPSSRGLLPLNGLQSRNSLIPQTQKWPSLKVKVGHDSIERDQAAIYQGFRSTLGKIRADANRAWDEEGALEFAFALEGWELQALNRLEYIEEPLQKVNEAAWSLEQQIEALERFYLQASIPYALDESIGDLVQAHRRNWERIRENLRKSFSGGRSSRGCACFVLKPAVLGFALTTRIAKLAREELQIPVVISSCMESGLGLAHAAFLAGEVDALPCNTPTLAHGLSTYSILSADLLSPSFASYVNAKGFLNVQSLGRALYGLNLDEVRTMLPDFCESSMQPHQEEDKYCAGTSFNRNEEISIVASLHLPFSAETAHARFTDLPQQPRWSPWITSVEYQGEISEWRMNVRGMSISWRARSEVRRAPHLGIQWESVDGLRNRGSVEFVPDSANSGNCQMQVRITLVPPALLKPLFHGAWIFLEDYLRDKLVQWSLEMFRDVVKADLALERGDLELGDALFNAVEGKATAIEATLNIEKSFE

SEQ ID NO: 93889 - protein, 353 aa, unidentified
  source 1..353: note = Flagellimonas maritima
  REGION 1..353: note = tr|A0A2Z4LW11|A0A2Z4LW11_9FLAO Isochorismate synthase OS=Flagellimonas maritima OX=1383885 GN=entC PE=4; SV = 1
MPYQKNKNFYRLLQKVDACLKTGMPFSIYRKPLENKVKGVFQSGDKLKTAINFEEKGFVFAPFDDNGAIVLIKADELAEVDFLPETKNIYTEVELKDSGKDFHIELIKKGLNEIKEGSLKKVVLSRKISRPVSSSPSLIFKNLLERYQNAFCYLFFHPQIGVWCGATPETLVQIKDRQLRTMALAATLPIKESSSPGWGSKEFEEQAMVTRYIKETLGSSLESIDIGELESVKAGKLWHLKSTISGILSEKTSIKQVIDSLHPTPAVCGIPSKEAKSFIKNNEGYERTFYTGFLGELDLEKKRNIDLFVNLRCMKICDGMASIFVGGGITSASEPESEWTETQNKSKTMLSII

SEQ ID NO: 93890 - protein, 403 aa, Flammeovirga kamogawensis
  REGION 1..403: note = tr|A0A553GGK9|A0A553GGK9_9BACT Isochorismate synthase OS=Flammeovirga kamogawensis OX=373891; GN = EO216_11100 PE=4 SV=1
MEKKSQNIISTKVENSTLDFDTVLAVALNSGQPFAAWKMPNENTQSIVVSLQKEALRVTSDLENLPNGFLARPFQDQDNKAFLIPADIYYTSDLPEIQFSSDYDFDTKVKVEKALNDFKHNKPLKKWKDNMLKEHFPPTSKEHFTSIVDDSIEAMKDDAFLKVVLSRTKEVPLKDDFSPIHFFHRLCKAYPNAFISVCFIPKVGLWMGASPETLISVDENGVFRTVALAGTQASNGMLPKDASWKSKEIEEQALVSRYIINCFKKIRLREFDEKGPRTVAAAHLLHLRTDFKVDTKATNFPQLGTVMLDLLHPTSAVCGMPKEVATQFILDNEHYNRSLYSGYIGPIGLKNRNHLFVNLRCLQIFNDHALLYAGAGITEDSDAEKEWKETEIKMDTMLKHLHS

SEQ ID NO: 93891 - protein, 335 aa, unidentified
  source 1..335: note = Flavobacteria bacterium
  REGION 1..335: note = tr|Q26CK2|Q26CK2_FLABB Isochorismate synthase; OS = Flavobacteria bacterium (strain BBFL7) OX=156586; GN = BBFL7_00467 PE=4 SV=1
MADSNEVKIVAQNDQTWHKTAPDKVAYAVFSKFQSNENQVYITADKTLNFRYSAPTSQPKINQSKIPEDGKKDYLELFEKAMSRLEKQQLSKVVLSRKQEFPLQDSDLEIFERLLDNYTTANGYFFYHPQVGKWLGATPELLMDAQSDGLYTAQSRTDAIPLRVSTMSLAGTAVDDGSLNHVWGDKEKEEQQLVTDFIISQFKESGAIDMKQSPVETVQAGHLIHLRTFIQARSSTNQIERLLGALHPTPAVCGLPRDESMEFIVNNENYDRSYYTGYLGIVNGASHHYFVNLRCMQLVDTKAIIYVGGGVTAKSDALLEYQETRAKMQTMHRLL

SEQ ID NO: 93892 - protein, 338 aa, unidentified
  source 1..338: note = Flavobacteriaceae bacterium
  REGION 1..338: note = tr|A0A3L9M4S8|A0A3L9M4S8_9FLAO Isochorismate synthase OS=Flavobacteriaceae bacterium YIM 102668; OX = 2479857 GN=EAH69_10970 PE=4 SV=1
MQNKFQEKFQEVIANQQSFLLFRQPNSSEVELWLDEEKNDENQFVFHRFDDSEHIIFSTDKVERIAINELVNIESFSLEQSSKKEAISYENYLELISKTVEELNTTSTEKIVISRIKEIENEGVNLIKTFKNLHQNYPKAFVYLWFTKENGLWIGASPELLLEEENLTVKTVSLAGTLPKEEEWTSKEIHEQQVVTDYIVSNLQDAKSISVNGPHTVDAGFFNHLKSYISAEVDDYEQVNKILNRLHPTPAVCGMPKQEAKNFILANEGYDRKYYAGYFGFKMPEKSLYFVNLRCAQIFSDVVKLYVGGGIMPDSNSEKEWQETELKSKTIGNLLVTD

SEQ ID NO: 93893 - protein, 355 aa, unidentified
  source 1..355: note = Flavobacteriales bacterium
  REGION 1..355: note = tr|A0A520U792|A0A520U792_9FLAO Isochorismate synthase OS=Flavobacteriales bacterium OX=2021391; GN = EVA43_04385 PE=4 SV=1
MDNLNVLKKIEQQYENNLPFVLYSYPKKESVNFILQKDNLVYDTGSSFKKYFLFSPFNDKNKNICIPLEKSNYFQTIYLKNNFEANEIKASEHVNDKNGYLKLVEDTIQEIKSNKATKIVVSRKKIVKLKKFDLLKLIERVLNLYPKAFRYVWYHPITGLWCGASPEVLLRTDGDFFKTMALAGTQKHIDNKIIKWNLKEKKEQQVVVDSLLKRLKKITSIVNISDTYNHKAGSLIHLRTDITGTIKRGKIGLKTLMSILHPTPAVCGSPKNYAKTFILENENYEREFYTGYLGSVNEPTNESILFVNLRCMKIENNTVNLYVGCGITKDSNPLKEWEETSHKSQTMLQVISSML

SEQ ID NO: 93894 - protein, 356 aa, unidentified
  source 1..356: note = Flavobacterium arcticum
  REGION 1..356: note = tr|A0A345HEM1|A0A345HEM1_9FLAO Isochorismate synthase OS=Flavobacterium arcticum OX=1784713; GN = DVK85_12655 PE=4 SV=1
MTDTDIFLKIKSHLKEKKPFVVYCKPGLDSVTGIFQKEATQYYLDTFTDVGFVFAPFSGDKKVFIPAKVSDVFTAKISIENLVATKVDEAPAINEEAKANFENLVSKSIKAIKTGVFNKLVTSRTEIVSESEIDIIEVYQRLLHTYPNAFRYCIYTPDTGLWTGATPEQLLKVDNKTLNTVALAGTQLYIEGEEVVWENKEKEEQQIVTDYIMSSLQEYSDTITTTPPYTFRAGNIVHIKTDVTAELKNNNALEDVINKLHPTPAVCGMPKAEAMQFILENEGYNREYYSGYLGEMHHDFTAGSNNHTNLFVNLRCMKVVDNEAHLYIGCGITKDSNPEKEFFETVNKSMTMRKVI

SEQ ID NO: 93895 - protein, 353 aa, Flavobacterium branchiophilum
  REGION 1..353: note = tr|G2Z781|G2Z781_FLABF Isochorismate synthase; OS = Flavobacterium branchiophilum (strain FL-15) OX=1034807; GN = menF PE=4 SV=1
MDHLLQNAAIQFKNKRPFVLYKKPFSNQMVGMFQQDTTCYTTSEFTEQGFVFCSFDGSNAILIPKNKSKLFVETISTVDQKKTNNPLVEASYTDKSDYIQKIEHAIARIHQHEFTKIVLSRKAVFKLNTYDIFDLYSKMIDLYPEAFAYCWFHPQVGLWMGAFSERLLKIENQQFETMSVAGTQKNNPPYPIVWHEKEKDEQQIVTNYIIENLKNEVNTIEVQNPITLKAGNLLHLKTTISGTIKNESALHHWINILHPTPAVCGFPKEQAKKYVSLHENYNRAFYSGFLGEINFNSINNQQDTDLFVNLRCMQLQDNQAILYVGGGITKDSNPEKEWEETQNKLETMKRIFI

SEQ ID NO: 93896 - protein, 354 aa, unidentified
  source 1..354: note = Flavobacterium circumlabens
  REGION 1..354: note = tr|A0A4Y7UCJ3|A0A4Y7UCJ3_9FLAO Isochorismate synthase OS=Flavobacterium circumlabens OX=2133765; GN = D0809_10455 PE=4 SV=1
MNNFFSKIKLHKEQNLPFVLYSKPNSTKMIGLLQQNNVLYTVSDFTEKGFVFASFDEKQLILIPENESEIITSEQENIEFSLIERSDSGFDPVAKKQYEDLVAKGIQAIKNEEFKKVVLSRSESVVVTDFDFITTFQQLIQLYPTTFSYCFFHPEIGFWMGATPEQLLKANGNVFETTALAGTQKAESEVEISWQQKEKDEQQYVTDFIVKRLREVALSVQVTEPYSIKAGSIWHIKTDISGVLNENSTLEEVIDTLHPTPAVCGLPKKKAKAFIIANENYDRTFYTGFLGELNSSLASNAVSSDLFVNLRSMQIMENKAILYMGCGITKESIPEKEWEESVNKSMTMKRVLGK

SEQ ID NO: 93897 - protein, 342 aa, Flavobacterium columnare
  REGION 1..342: note = tr|A0A120HKV2|A0A120HKV2_9FLAO Isochorismate synthase OS=Flavobacterium columnare OX=996 GN=AWN65_05445; PE = 4 SV=1
MNLPFVLYRKPNTKTLVGIFQENDHIYFTENFKEEAFIFAPFTGVPIIFPLEKSELKYNSVYFDHEIKDLEIDILENLLDKQNFIELVKKGISIIETGDFDKVVLSRTEEVLIKGFDMFRSFEQMLFKYPSAFCYTWYHPKIGLWMGATPEKLFSIKENNFETMALAGTQIAQNEERVLWTKKEKKEQQFVTDFIKDQLKGIIYDLQISDAYTSKAGKLFHLRTDIKGIVKDATILEEIINVLHPTPAVCGVPKMITKNFIEKEEGYHREFYTGFLGELNIDCNTNEKSTDLYVNLRCMKVLENKINLFIGCGITRDSNPESEWYETLNKSKTMRIIINNSK

SEQ ID NO: 93898 - protein, 354 aa, unidentified
  source 1..354: note = Flavobacterium cupreum
  REGION 1..354: note = tr|A0A434A6B5|A0A434A6B5_9FLAO Isochorismate synthase OS=Flavobacterium cupreum OX=2133766; GN = D0817_12090 PE=4 SV=1
MNNFFSKIKLHKEQNLPFVLYSKPNSTKMIGLLQKNNILYTVSDFTEKGFVFASFDEKQLILIPENESEIITAEQENIEFSPVETHDLSFDPAAKKQYEDLVAKGIEAIKNEEFKKVVLSRSESVAVSDFDFITTFRQLIQLYPTTFSYCFFHPEIGFWMGATPEQLLKANGNVFETTALAGTQKANVEAEISWQQKEKDEQQYVTDFIVKRLREVALSVHVTEPYSIKAGSIWHIKTDISGVLNDNSTLEEVIDTLHPTPAVCGLPKKKAKAFIIENEHYERTFYTGFLGELNSSLASNAVSSDLFVNLRSMQLQDHKAILYMGCGITKESIPEKEWEESVNKSMTMKRVLRK

SEQ ID NO: 93899 - protein, 353 aa, Flavobacterium frigoris
  REGION 1..353: note = tr|H7FU55|H7FU55_FLAFP Isochorismate synthase; OS = Flavobacterium frigoris (strain PS1) OX=1086011; GN = HJ01_02775 PE=4 SV=1
MIDFFIKVKQQESQNLPFVIYRKPNKTKLIGLFQKNDHLYFAEDFKETGFVFAPFNGSQIILIPKKESILWESELTAFKADYDSENKYPVNNQDKERFESLVQKGVDATTRGVFKKVVLSRKEIIDLPNFDLVSVFKKLIYTYPDAFCYCWYHPKIGLWIGATPERLLKASRKKFFTMALAGTQNYEDTIDVVWEKKEMEEQQFVTDFILDNIKLLTREVAVSSPYTLKAGGILHIKTDIEGKLNKDSNMKQVVSVLHPTPAVCGLPKESARNFILENEKYDREYYTGFLGEINKKEFSKDTSKTDLYVNLRCMQITNKEAHLYVGCGITKDSIPENEWKESVNKSMTMKRVL

SEQ ID NO: 93900 - protein, 342 aa, Flavobacterium indicum
  REGION 1..342: note = tr|H8XUX7|H8XUX7_FLAIG Isochorismate synthase; OS = Flavobacterium indicum (strain DSM 17447 / CIP 109464 / GPTSA100-9) OX=1094466 GN=menF PE=4 SV=1
MLLLEKASHYFSKKLPFALFVKPNQVQLNGVFQNTDELVEFSGQKGFVFSGFYNTKDVVLPFDSCEVIQENWSYEKHYQERIYFSDSEGVEFKNLVQKGINAIVENQFEKVVLSRKIEIPNDTINSIESFKNLVNTYSTAFRYLFYHPQIGLWMGATPEQLVKIKNGEFYTMALAGTQPYSEHIVWGEKEIKEQELVTDFIKNQIEDKVDTIKISDAITHRAGSIVHLKTDISGSIKSSIQPLVLVKALHPTSAVCGMPLQQARSFILEHEGYDRKYYSGYLGEWKGMENSDLFVNLRCCEFLENAVAVYVGCGITKDSIPEHEFIETFNKSRTIVSILVRG

SEQ ID NO: 93901 - protein, 352 aa, Flavobacterium johnsoniae
  REGION 1..352: note = tr|A0A525HCQ6|A0A525HCQ6_FLAJO Isochorismate synthase OS=Flavobacterium johnsoniae OX=986; GN = DI588_00655 PE=4 SV=1
MSGLYQKAEEQFKKRLPFVLYSKPGETVAVGIFQKDASLHFTTDFKEEGFVLAPFHGEQFVLLPKEKSDVFTEAYTRIAIENNNTVFGADVAAKENFEQLVQNGVDAICKGDFKKVVLSRKETVSLENATPFELFKKLLSAYPTAFKYCFFHPEIGMWLGATPEQLLKASGDRIKTVALAGTQVYHEGEIKWEIKEQEEQEFVTEFILEGLEDCTAEKNSSKPYTFRAGNIVHIKTDIEARLHDRQDLGKIIKMLHPTPAVCGLPKEASKKFILENEGYDREYYSGFLGELNRDFAKDKPENSDLFVNLRCMKLQNGKANLYIGCGITKDSIPEKEFIETVNKSLTLKNILG

SEQ ID NO: 93902 - protein, 353 aa, unidentified
  source 1..353: note = Flavobacterium macacae
  REGION 1..353: note = tr|A0A3P3W408|A0A3P3W408_9FLAO Isochorismate synthase OS=Flavobacterium macacae OX=2488993; GN = EG849_12740 PE=4 SV=1
MSELLKKGTSYLKEEMPFVIYSKPNEAEIIGIFQKDNSLNHTENFTETGFVFAPFDGEKFVLIPENDSDILVEAISEITILNSLNSASEINSEVKENFENLVQKGIDAIHSGTFQKVVLSRTEAVSLENADVIFLFQKLVATYKTAFKYCFFHPKIGLWLGATPEQLLKVNSNEIKTVALAGTQVFHEGEIIWENKEKEEQQFVTDFISQNLDEFVSEKHTSDPYTYRAGNIVHIKTDISATLKDKKDVKKVLKILHPTPAVCGLPKLKAKEFIIKEEGYNREYYSGFLGELNKDLAKNEFEKSDLFVNLRCMKIEDKTASLFIGCGITKDSDPEKEFFETVNKSLTMKKILF

SEQ ID NO: 93903 - protein, 361 aa, Flavobacterium pectinovorum
  REGION 1..361: note = tr|A0A502E8W9|A0A502E8W9_9FLAO Isochorismate synthase OS=Flavobacterium pectinovorum OX=29533; GN = EAH81_24770 PE=4 SV=1
MNDFFSTIRKHQAQNLPFVIYSKPNSSSIFALLQQNDTLYTVSDYSEKGFVFASFDEKQLILIPEEESKIISAEQTKVDFDFNETEDLTFDLEAKTQYEDLVSKGIEAIKNDEFKKVVLSRSEKIDFADFDFVITFKRLIHLYPTTFSYCFFHPQIGLWMGATPEQLLKASGNVFETTALAGTQKATLETEISWQQKEKDEQQYVTDFIVKRLREVASSVVVTEPYSIKAGSIWHIKTDISGVLNDNSTLEEVIDTLHPTPAVCGLPKKKAKAFIIENENYDRTFYTGFLGELNSSFANKTVSSDLFVNLRSMQIHDGKAILYMGCGITKESIPEKEWEESVNKSMTMKRVLNIKKNNSSC

SEQ ID NO: 93904 - protein, 353 aa, Flavobacterium psychrophilum
  REGION 1..353: note = tr|A0A238NST2|A0A238NST2_FLAPS Isochorismate synthase OS=Flavobacterium psychrophilum OX=96345 GN=menF; PE = 4 SV=1
MNIIFNKGKDFLSKKIPFVIYCKPNSNKLVGVFQKNDNLFEIENFEEIGFAFVSFDGKKKYLIPKNESDIYIETITKIDHCTENNININIDANAKITFENLVKKGINAIQNKQFDKVVLSRKETLKINVFDFQNVFNKFLFNYQNTFKYCFYHPKIGFWMGATPEQFLQSYQNTIKTVSFAGTQPYCEKEKYIWEEKEKQEQQFVTDFILDNLKKHSTQILFSEPYTFRAGSVVHLKTDIEAIINTQNNFSNIIKNLHPTPAVCGLPKDRAMQFIINNEAYDRTYYTGFLGELNIDFETLKNKKSDLFVNLRCMNIEDNLANIYIGCGITKDSIAENEFTETVNKSKTMTKVL

SEQ ID NO: 93905 - protein, 354 aa, Flavobacterium sp.
  REGION 1..354: note = tr|A0A553AEY1|A0A553AEY1_9FLAO Isochorismate synthase OS=Flavobacterium sp. GT3R68 OX=2594437; GN = FNW07_09790 PE=4 SV=1
MIDFFIKVKQQEAQHLPFVIYSKPNKNKLVGYFQKNDHLYFAEDFNETGFIFAPFDGSQIILIPKRQSVKWESHFLSFEENHHSNFVSAENEQDKAHFETLVQKGIDAINNGFFNKVVLSREEIIDVPDFDVVGVFEKLVRTYPSAFTYCWYHPKIGLWMGATPERLLKSKKNKFYTMALAGTQSFNGSSKVSWENKEKEEQQLVTDFILDNLKNVTSEVAVSSPYTLKAGNILHIKTDIEGIINEDSTLEQVVSILHPTPAVCGLPKSIAKDFILKNEEYDRQYYTGFLGELNFKSSNFEKAKSDLFVNLRCLQIKDKQAHLYVGCGITKDSIPEKEWIETVNKSLTMKKIIV

SEQ ID NO: 93906 - protein, 366 aa, Flavobacterium succinicans
  REGION 1..366: note = tr|A0A199XSR1|A0A199XSR1_9FLAO Salicylate biosynthesis isochorismate synthase OS=Flavobacterium succinicans OX=29536 GN=pchA PE=4 SV=1
MIDFFIKVQQQIALNLPFVIYHKPNKSKLIGFFQKNDHLFFVDDFKESGFVFSPFNGNQMILIPLKESVKWETIVPTVEFEETKVTSSDENQEAKNHFLALIEKGVETIKKGVFDKVVLSRQEEVNVSNFDVVTTFEKLIALYPTAFTYCWFHPKIGLWMGATPERLLKANKSKFYTTALAGTQIFDPKKRTAVWGNKEQKEQQYVTDSILDSLKNHTAEIVLSSPYTVQAGKLLHINTDIEGVLKRSSSLKEVVSVLHPTPAVCGLPKQQAKDFILANEGYDRSYYTGFLGELNVKGDYLNKPKSHLFVNLRCMQIKQSEDKSDTAKAYLYMGCGITLESIPEKEWEESVNKSMTMKRVLDKMEQ

SEQ ID NO: 93907 - protein, 427 aa, Flexivirga sp.
  REGION 1..427: note = tr|A0A3M9MIA0|A0A3M9MIA0_9MICO Isochorismate synthase OS=Flexivirga sp. BO-16 OX=2294115 GN=EFY87_00865; PE = 4 SV=1
MTLPLPQSHPALVVRSTRIQDPGDLVSLIPPGAEAPISWLRDGDGFVGWGTAAAIQTQGTARFEDAELWWSEVVRDAVVRSEVDLPGSGLIAVGSFAFAATSAAGGVLHVPATVVGRHHDVCWLTTVGTAAQLPATPALTAGAAPAPPVVADAYDGALTGEQWAGAVATAVGRIQSGALDKVVMARDVVVRSSTPIDPRHLLRNLSASYPNTWTYSVDGLIGATPELLVRRQKGLVTSRVLAGTIRRTGDDEHDLALAASLARSSKDLEEHEYAVRSVADALSPHCSSMNVPESPFVLHLPNVMHLATDVAGVLHEDVSSLTLAASLHPSAAVCGTPTLAARDLIAELEQMDRGRYAGPVGWLDADGDGEWGIALRCGALESPSQIRLFAGCGIVAGSHPSAELSESEAKLVPMLQALGCGAEGGRS

SEQ ID NO: 93908 - protein, 373 aa, Formosa agariphila
  REGION 1..373: note = tr|T2KKH6|T2KKH6_FORAG Isochorismate synthase; OS = Formosa agariphila (strain DSM 15362 / KCTC 12365 / LMG 23005 / KMM 3901) OX=1347342 GN=BN863_12040 PE=4 SV=1
MHHDDFFESLNAQFQDALPFVAYRTPNENQVNAVFQHDDTLYETKDLSESGFVFAPFDDASKMVLMPLAASDLECCDAFEGTASEQVNSELVSTSNQKIAYIETIKKAISAIAQTDLKKVVLSRPDYVTKDNLEVFEVFKRLLATYKTAFVYCWYHPKIGLWLGATPETLLKIEGQRMSTMALAGTQVYKGTTEVSWGTKEAQEQQFVTDYIVSNLDAEVEHVSTSERRTVRAGGLLHLQTQISARLGKDYSGLLHIVRALHPTPAVCGLPKAEAKAFILEHEGYNREYYSGFMGELHFKKRQTRNTNRRNVENNVYATVKTVSNLYVNLRCMQVLPSKIALYVGGGITKDSNPEAEWEETVSKTSTMKKVLF

SEQ ID NO: 93909 - protein, 429 aa, unidentified
  source 1..429: note = Franconibacter pulveris
  REGION 1..429: note = tr|A0A0J8Y6N9|A0A0J8Y6N9_9ENTR Isochorismate synthase MenF OS=Franconibacter pulveris OX=435910 GN=menF; PE = 3 SV=1
MLSIEDALQRLADRLTTPLPDQPGLRRLCTPVTLSDASDPLAWLASQPFFPQFYWQQRSGSDEAAALGALKRFNSLPQAQAFLQQADEPELRIWGLNAFNPHEGDLFLSRLEWRRHEGQAWLCLHLWSETSLKEDARQATAFLNALQPARLLPPLNSRLVEECHIPDKEGWCERVRLATRAIHQQEMDKVVLARASDLRFGRPVCAAALMAASRRVNLNCYHFYMAFSEHDAFLGSSPERLWRRIDRALRTEALAGTIENHPDDHRAWALGQLLLADDKNQRENLLVVEDICQRIEKLGDGYDVLPPQVLRLRKVQHLRRCIWSTLFQPDDALCLQQLQPTAAVAGLPREAARLFIGEHEPFTRGWYAGSAGYLSLQQSEFCVSLRSAQVTGDTVRLYAGAGIVSGSDPEQEWQEIENKAAGLHTLLCR

SEQ ID NO: 93910 - protein, 429 aa, Frankia sp.
  REGION 1..429: note = tr|A0A166PW97|A0A166PW97_9ACTN Isochorismate synthase OS=Frankia sp. EI5c OX=683316 GN=UG55_103016 PE=4; SV = 1
MLPLLTEPADLLADYRSGGSFLFASRRGVLLAEGAAALVAAGPWGLAADSISGELAGYTGLDQFAGAGWTGTRRSPIAVGVVPFDLNRPGRLVVPAAVRESEPLDVPVARPRNPAAAPDDSLDPLAPHPHPEPEMAVRASGRLEALPTPADYAAGVARAVRMLRAGELDKVVLARTLRVPGPVDAAALLRRLARRDPQAFVFGAQAPLPAIGQPGVYGSVGGTLVGASPELLLSRRGPLVVSNPLAGSAARSADPQEDRRRAAALLASAKDAHEHAVVVGAVADALRPFCLGLDVPAAPSLIRTATMWHLSTRISGWLADPSVSSLRLAAALHPTPAVCGWPTSAARAALNELEPFDRGSYTGLVGWCDAEGDGEWALAIRCAEIASDGSLRLFAGAGIVAESRPADELAETSAKFRTLGRAMGLGDDL

SEQ ID NO: 93911 - protein, 412 aa, unidentified
  source 1..412: note = Frankiales bacterium
  REGION 1..412: note = tr|A0A3A3ZEF6|A0A3A3ZEF6_9ACTN Isochorismate synthase OS=Frankiales bacterium YIM 75000 OX=2339232; GN = D5H78_16345 PE=4 SV=1
MSTLPLTATLVRTRAVPDPGPLVGRLPGAGGLAWVRRGDGLVAWGEAARLEVSGPDRFAEAARWWREVCATILVDDPVGLPGTGAVALGSFAFGDDDGTRSVLVLPRVVLGRRGGRAWLTTVGDAPEADAVPEPVAAPVGVVYGEGAVSPVRYEEAVAEAVRLIAASPLEKVVLARDLLAVAEQPVDPRWLLGRLATRYPACWTFAVDGLVGATPELLVRLERGLVTSRVLAGTIRRTGDDDRDLVLAASLARSSKDLEEHEYAVRSVADALAPHCTGMNVPETPFVLHLPNVMHLATDVAAVAADRSSSLELAAALHPTAAVCGTPRDLALAAIDRLEGLDRGRYAGPVGWVDATGAGEWGIALRSAALDPDDPRRLTLYAGCGIVAGSDPEAELAESQAKLVPMRDALGA

SEQ ID NO: 93912 - protein, 424 aa, unidentified
  source 1..424: note = Frederiksenia canicola
  REGION 1..424: note = tr|A0A3N4WJ67|A0A3N4WJ67_9PAST Isochorismate synthase MenF OS=Frederiksenia canicola OX=123824 GN=menF; PE = 3 SV=1
MSIFAELKQQLTEKINALHCTTRWVELMAELPLASECDLLGWLKGQSHFPQSFWKNRDSDLTFATVGEAIAFEQLEDAQAFSSKTGFRLFGGLKFEGQCRLILPRLRFAKNSQKLTACLYLNGSNLAEEKAICADLLGNLNKTATLKPLENTIIQQSVACDFNRWQQNIEQAISAISQQHFRKVVMANATVLECEQDISPYDLLAASQQKNLGCYHFLWAENVADAFVGSSPERLYRRQDRQFETEALAGTAAVTQDAQETERNAQWLLQDEKNIFENQLVVDDIQHHLADCVTEFTVSTAQIKRLHNVQHLRRQIHATLKADINDAECLIRIHPTAAVAGLPRLSAVNFIQQHEPFERGWYAGTLGHFCPQEAEFCVALRSAAMMKNVITLYAGAGIVQGSEALLEWAEIERKALAILRLFKQ

SEQ ID NO: 93913 - protein, 478 aa, Frigoribacterium sp.
  REGION 1..478: note = tr|A0A1R4FML5|A0A1R4FML5_9MICO Isochorismate synthase @   Menaquinone-specific isochorismate synthase; OS = Frigori  bacterium sp. JB110 OX=1434829 GN=CZ774_08360; PE = 4 SV=1
MRTSHRDAHVWTGFCRRSAHLDGRRQAFSGPEYGGLVTTDERLSLPKLVATTREVPPLDDPLLHASAGDPLAWIRRGDGIVGAGPELLRLDIGEDSRLEALTDIWHAIVQATDVDDEVQLPGTGLVAFGAFAFDEASDAPSTLIVPSTVIGRRGGRHWITRITRAEGADVPDVDEVGYGPQWSATLGPGRMDPAAHSDAVRDVLGRIADGEAEKVVIARDISGTVPAGADLRRLVSELAHGYPDTWTFAVDGLIGASPETLVTVSGGTVTARVLAGTIPRGADADEDTALSVELAKSDKNVEEHAFAIASVLEALRPYTATLEASETPSLLRLPNLWHLATDVTGTLSNGASALNLVRALHPTAAVGGTPRDVAMRIIRDVEPFDRGRYAGPVGWIDGNGDGEWAIALRCAQFGGAGDTTSTGDDEGDDPAAADWSRGANATRRVTAHAGGGIVSGSVPESELDETRVKFRPIVDALA

SEQ ID NO: 93914 - protein, 427 aa, Gallibacterium anatis
  REGION 1..427: note = tr|A0A263HKH0|A0A263HKH0_9PAST Isochorismate synthase MenF OS=Gallibacterium anatis OX=750 GN=menF PE=3; SV = 1
MDVFQQLKSLLTTQIAIYQPDCRRFGEIQASIEASNIDLIAWLKGQAVFPQFYLQQRQQQYQIAAVGAVSHITSFEELTTFKQDYPHFNLVGGVQFLGEVKFILPRIYLHYQQQKLTVKLLFNQRIWQQEKQQLLQILQQLPHPQTCNDIKDITPILHHQSSTQSQWRQLIQNALNAIKQQQFNKVVLAREAVFHLDQPLNGYDFLALSRQTNQHCYHFAVVESAHSMFLGASPECLYRRTDSQFQTEALAGTAPIGETDEQQRQYQQWLLQDQKNLLENQFVVDDICQKIQPYCQKIEVGKVQLRQLRKVQHLCHPIDASLQPQHQYWEPLFALHPTAAVAGYPRQAALSFIKSNEPFQRGWYAGAIGVISHAFAEFCVGLRSAKLTHQQLHLFAGAGIVKESQADEEWQEIERKMSGLLSLFERK

SEQ ID NO: 93915 - protein, 427 aa, unidentified
  source 1..427: note = Gallibacterium genomosp.
  REGION 1..427: note = tr|A0A0A2Y6F7|A0A0A2Y6F7_9PAST Isochorismate synthase MenF OS=Gallibacterium genomosp. 1 OX=155515; GN = menF PE=3 SV=1
MDVFQQLKSLLTTQIAIYQPDCRRFGEIQASIEASNIDLIAWLKGQAVFPQFYLQQRQQQYEIAAVGAVSHITSFEELTTFKQDYPHFNLVGGVQFLGEVKFILPRIYLHYQQQKLTVKLLFNQRIWQQEKQQLLQILQQLPHPQTCNEIKDITPILHHQSSTQSQWRQLIQNALNAIKQQQFNKVVLARETVFQLNQPLNGYDLLALSRQTNQHCYHFAIAESAHSIFLGASPECLYCRTDSDFQTEALAGTAPIGETDEQQRRYQQWLLQDQKNRLENQFVVDDICQKIQPYCQTIEVGKVQLRQLRKVQHLCHPIKATLQPQHQYWEPLFALHPTAAVAGYPRQPALSFIKNNEPFQRNWYAGAIGVITQSFAEFCVGLRSAELTNQQLHLFAGAGIVKESQADEEWLEIERKMSGLLSLFELK

SEQ ID NO: 93916 - protein, 427 aa, Gallibacterium salpingitidis
  REGION 1..427: note = tr|A0A1A7NSN0|A0A1A7NSN0_9PAST Isochorismate synthase MenF OS=Gallibacterium salpingitidis OX=505341; GN = menF PE=3 SV=1
MNVLQQIKTLLTEQIAIYQPSSQSFGEIQISLNSPAVDLLTWLKAQTLFPQFYFEQRKQEYVVATIGAIHTINDFTLLTQLKQEYPTFNFIGGVKFAGEIQFILPRLYLECRSHQVIVKLFIDHRNWSNERQKLSQDLALLTEQQPLTSISQIKPNLLSQSSDQRSWQQLIQNALIAMQKKQFAKVVLAQEMIFQLNKPLNAFDFLAASRLVNHHCYHFILAETADNIFLGASPECLYQRSANHFHTEALAGTAPIGETAQQQQKYQSWLLQDPKNLEENQFVVDDICHRLAPYCTEINIEKVQLRQLRKVQHLCHPIHATLAVEYTDWEPLFAIHPTAAVAGYPKQAAMDFITHNEPFKRNWYAGAIGVISQNFAELCVGLRSAKVTNTQLHLFAGAGIVKESKADEEWLEIERKMSGLLSLFEIN

SEQ ID NO: 93917 - protein, 145 aa, unidentified
  source 1..145: note = Ganoderma boninense
  REGION 1..145: note = tr|A0A5K1K2Q1|A0A5K1K2Q1_9APHY Salicylate biosynthesis isochorismate synthase ) OS=Ganoderma boninense OX=34458 GN=Q51508 PE=4 SV=1
MCVLFPLFLVDSPRTLADLLCIGFVYRFISTGTIEEKIFQRQANKQSLSSAVVDEKEDVERHFSLDALRKLFLFNENTLCETHETFKCKRCKDGRQFIKAPALLYGDASTWNHFTNGELRNNHDDLLRAEVGLPEVSFVFQYISH

SEQ ID NO: 93918 - protein, 532 aa, unidentified
  source 1..532: note = Geitlerinema sp.
  REGION 1..532: note = tr|K9S5L0|K9S5L0_9CYAN Isochorismate synthase; OS = Geitlerinema sp. PCC 7407 OX=1173025 GN=GEI7407_0556; PE = 4 SV=1
MAKEGSRHGTILHRASVRLQTADCLSFGAWMRAGGFPSGDATLFNPVCRIAETFVIHLSMPATPSCANLLQSRRELLNLLLASHQVASHENQQQLISISLEINTIDPLAFLENFYQENQLHFYFEKPCQSVAIAAIDSVIHFQLEGQNRFQIAQQRIQQELKKIVAVGASETPFAGPHFFCGFTFSEAERSPKAPFPAATVFLPRWQVARHYQRTVLVANVAIAPQDSPEPLADLLWQRIQAIQAVSSLSPSPRSRPSQTFQQRDVVPVSQFQASVQRVLQDIADQAFHKVVLAHAVDVTAARAFRLPACLDNLRRLYPDCHVFSMGNGQGQNFLGASPERLISIRQQRLKTDALAGSAPRGATPQEDLRLAQDLRQSVKERHEHQLVLDFILQQLLALGLVPQRSPLPRILTLSNIQHLWTPIQAPVPPDVHPLEIVAALHPTPAVAGTPRAIACQQIGHHEPFARSLYAAPLGWVDYQGNSEFIVGIRSALLEGRHARLYAGVGIVAGSEPERELAEIKLKLQALLSALV

SEQ ID NO: 93919 - protein, 467 aa, unidentified
  source 1..467: note = Gemmatimonadales bacterium
  REGION 1..467: note = tr|A0A524IW40|A0A524IW40_9BACT Isochorismate synthase OS=Gemmatimonadales bacterium OX=2448054; GN = E4H28_02165 PE=4 SV=1
MRPRSPTSALSLRDMFLPGIDSPAADQPAVLLLAAELPPEADPLNLWLAISGESGAFWETEEETISGVGVCLRLDPAGVWTEQIRRVAAAVRVPTMDSSSGHAPEPRLLGSLPFAPDWVDEQWACLSRPGFVLPRWTMFRAAGLVTLQLAVEGPVDDAVRETIERDLASIESTLFGDSGTEQPWAQPSPARTPRDQDAASWQTAVESAVTAIREGLLQKVVLSRSVTHDFPYPVSPIALLRLLRESRAGRYRFGFRQGDTAFVGASPECLFDKRSNSVRVEALAGTYDLGPDNTADALIRATEHLFASGKDLEEHSLVVWGILDALGSMSDSVSADEWPVVRESQGLAHLSTNVTAELRPGVTPLTLIEALHPTPAVGGLPGSAALEFIRQVEPEPRGLFAAPVGWISPAGDACIAVAIRSALLTGDQARVYAGAGIVAGSDPAAEWEETAAKLRWLGKLGPEDEGA

SEQ ID NO: 93920 - protein, 429 aa, unidentified
  source 1..429: note = Gemmatimonadetes bacterium
  REGION 1..429: note = tr|A0A3M2FXZ9|A0A3M2FXZ9_9BACT Isochorismate synthase OS=Gemmatimonadetes bacterium OX=2026742; GN = D6675_14225 PE=4 SV=1
MMNRIEIPIPPLDPLIWLSHQSLPQKLFWANRDRTEIVAGSGVADVVRCENRLDACFQSFAEVTYPQRYWGGFRFDPTRPFGAEWRVTGNGYFVLPKFEVGLRENRWFLAGNFPEEKRAEVDVTLQQMRANVASFSPANHHSLVPAPPFLKRTDVPDKTGWIKAINTTLRQFVPHAFEKVVLARRSIFEADRGIDPVWILQKLAKANPNTFLFLMQFSADSAFISATPERLYARQQRILQSEALAGTRPRGRSPEEDDQLQHVLLHSEKDRREHRIVTTSIRQAFEPLCESVTVEDGVNVLKLSQLQHLYQRVEGVLLPDQGEADIINRLHPTPAVGGRPATRALQHIREWEVFDRGWYAAPVGWASADASEFAVGIRSGLVAGRRLYLYAGAGIVPGSHPAAEWQEIENKQNSFLRALGVYPHEKTVR

SEQ ID NO: 93921 - protein, 411 aa, Gemmatimonas aurantiaca
  REGION 1..411: note = tr|C1ACN7|C1ACN7_GEMAT Isochorismate synthase; OS = Gemmatimonas aurantiaca (strain T-27 / DSM 14586 / JCM 11422 / NBRC 100505) OX=379066 GN=GAU_3222 PE=4 SV=1
MTALPFLLSSGPETFMASGVVERVRFARGAGLPAAVAACFAGTQAEDPHGVLVGAIPFDRARTLELLRPERVTRSATWEAAWAAHGGSAPQSSDDAQHGAFVPGVWHVVPQPTRAQYEAAVARATAHMVDDAEAAAADPLRKVVLSRSLQLNSTAPIDIRRLLARLRLDPSVTTFATPLPATPDGAARSLVGATPELLVAKSGRTVSSHPLAGSTRRRLVAADDRAAAEALLRSDKDQREHAAVVEAIADVLSPYCSSLDFARSPALVSTATMWHLGTRITGQLRDDAVSSLELLDVVHPTPAVCGVPQPRAQSLITELEGFDRDYFTGAVGWCDARGDGRWMVTIRCAEIAGTRARLYAGAGIVIGSDPAGEGAETSAKFETMLRALSAQEVLARAHRPVAAPAGEPQHA

SEQ ID NO: 93922 - protein, 460 aa, Geobacillus galactosidasius
  REGION 1..460: note = tr|A0A226QM49|A0A226QM49_9BACI Isochorismate synthase MenF OS=Geobacillus galactosidasius OX=883812; GN = menF PE=3 SV=1
MAILYQHKIQEQLRFIGKKANRPFISWSEEIDHVDPVYFFSLGQACSFRQRFYWSDRTNETVYVGLGCTYIIETEEKEQRFRTVETEWKRWMEQTASYSNGTDAVPIIFGGFSFDPFKPRTEKWRAFPHAKMIVPTVLLSLKNGKATLTVTMRSEQNEEIIKKIGMLIRLLYQEQKQQTSSLPPLITYKEVQKEEWFDAVKKTIENIRKGKFDKVVLAREARLSFADAIDPSVVLQQLREQQPFSYIFAFEQEGQCFIGASPEQLVKKEKDTCYSICLAGSIRRGKTLQEDEQLGKWLMNDEKNLREHQFVVQMIKEAIEAVCKRVQIPSSPQLLKLQHIQHLYTPVIGEKCRAASVLSIVEQMHPTPALGGTPREKAIKEIREAEPLDRGWYAAPIGWMDAEGNGEFAVAIRSGLLQGKEASIFAGCGVVGDSDPMSEYEETKVKFTPMLSALGVERDE

SEQ ID NO: 93923 - protein, 458 aa, Geobacillus kaustophilus; identical to SEQ ID NO: 93285
  REGION 1..458: note = tr|A0A4D7QCD8|A0A4D7QCD8_GEOKU Isochorismate synthase MenF OS=Geobacillus kaustophilus NBRC 102445; OX = 1220595 GN=menF PE=3 SV=1

SEQ ID NO: 93924 - protein, 457 aa, Geobacillus lituanicus
  REGION 1..457: note = tr|A0A223DVB7|A0A223DVB7_9BACI Isochorismate synthase MenF OS=Geobacillus lituanicus OX=169283 GN=menF; PE = 3 SV=1
MAIGFQHTLQQQLHELAVRAARPFVSWTESLEGVDPVSFFMQGPSCGFRERFFWSDRSGGTILVGLGSVHAIETGEKDGRFREVDARRRQWASQIERHGDTDAPPLLFGGFSFDPHRTPTDVWRGFSAGKLIAPAVLLSMRNGQAKLTVTLPAGGGGREIEQVGRLLGRIAAPPLPAPLPALVAAREADSGRWMEAVRQAIASIRAGALDKVVLARARQLTFAGTIDAGSVLARLREQQPFAYLFAFEQDGRCLIGASPEQLVQKEGETCRSICLAGSARRGATVEEDERLGAWLLSDRKNRQEHQFVVRMISRLFAEVCEAVEMPDGPQLLKLPHIQHLCTPVVGRGCREPSVLRLVERMHPTPALGGTPRERAMETIRALEPLERGWYAAPIGWVDAYGDGEWAVAIRSALLAGSQAFLFAGCGIVADSDPQSEYEETNVKMAPMLSALGVMHHD

SEQ ID NO: 93925 - protein, 458 aa, Geobacillus sp.
  REGION 1..458: note = tr|L8A2A1|L8A2A1_9BACI Isochorismate synthase MenF; OS = Geobacillus sp. GHH01 OX=1233873 GN=menF PE=3 SV=1
MAIGFRHHLQQQLHRLAVNAGRPFVSWTEPWEGVDPVSFFMQGPSCGFRERFFWADRTGGTILVGLGSVYAIETEKADSRFDDVEAGRRRWEKEMEPYGAADAPPLLFGGFSFDPYRPGTDMWRGFPAGKLVAPAALLAVRNGKTTLTVTVPTDKRGRDWERVGRLLERISDPMAAPKRLPRLVSDEEEEKERWLAAVREAIASIRAGALDKVVLARARRLAFAKTVDAAAVLQRLREQQPFAYIFAFEQDGRCFIGASPEQLVQKEGKMCRSVCLAGSVRRGAAMEEDERLGAWLRADRKNNEEHQFVVQMIGRLFSSVCETVEMPPAPQLLKLPHIQHLCTPVVGRGCRERSVLRLVEMMHPTPALGGTPRDRALEVIRALEPLDRGWYAAPIGWVDGEGNGEWAVAIRSALLAGKEAMLFAGCGIVADSDPNSEYEETNVKMAPMLSALGVMNDG

SEQ ID NO: 93926 - protein, 457 aa, Geobacillus stearothermophilus
  REGION 1..457: note = tr|A0A0K9HLX3|A0A0K9HLX3_GEOSE Isochorismate synthase MenF OS=Geobacillus stearothermophilus OX=1422; GN = menF PE=3 SV=1
MAIGFQHTLQQQLHELVVRAARPFVSWTESLEGVDPVSFFMQGPSCGFRERFFWSDRSDGTILVGLGSVHAIETGEKDGRFREVDARRRQWASQIERHGDTDAPPLLFGGFSFDPHRTPTDVWRGFSAGKLIAPAVLLSMRNGQAKLTVTLPAGGGGREIEQVGRLLGRIAAPPLPAPLPALVAAREADSGRWMEAVRQAIASIRAGALDKVVLARARQLTFAGTIDAGSVLARLREQQPFAYLFAFEQDGRCLIGASPEQLVQKEGETCRSICLAGSARRGATVEEDERLGAWLLSDRKNRQEHQFVVRMISRLFAEVCEAVEMPDGPQLLKLPHIQHLCTPVVGRGCREPSVLRLVERMHPTPALGGTPRERAMETIRALEPLERGWYAAPIGWVDAYGDGEWAVAIRSALLAGSQAFLFAGCGIVADSDPQSEYEETNVKMAPMLSALGVMHHD

SEQ ID NO: 93927 - protein, 458 aa, Geobacillus subterraneus
  REGION 1..458: note = tr|A0A143MMF1|A0A143MMF1_9BACI Isochorismate synthase MenF OS=Geobacillus subterraneus OX=129338; GN = menF PE=3 SV=1
MAIVFQHKIQQQLHELAASAARPFVSWTEPLEDIDPVSFFMQGPACGFRERFFWSDRSGGTVFVGLGSAYAIETEETDGRFQYIEQERQRWAGQIEQHGEADMPPLLFGGFSFDPHRPPASVWRGFSAGKLVAPAVLLSVKNGRTLLTVTLPAGGMERDMERIGRLLRRMEEPLPFSAEFPTVISDEEEEKERWLAAVHEAIASIRTGRLEKVVLARARRLAFNAVIDAAFVLRRLREQQPFAYLFAFEQDGRCFIGASPEQLVRKEGETCRSVCLAGSVRRGGSVAEDEQLGAWLQADSKNREEHQFVVRMIRSLFSSVCETVEMPAVPQLLKLPHIQHLCTPVVGRGCREPSVLRLVELMHPTPALGGTPRERAMEAIRSLEPLDRGWYAAPIGWVDADGNGEWAVAIRSGLLEGNKATLFAGCGIVAHSDPTSEYEETNVKMAPMLSALGVMNND

SEQ ID NO: 93928 - protein, 458 aa, Geobacillus thermocatenulatus
  REGION 1..458: note = tr|A0A226QB55|A0A226QB55_9BACI Isochorismate synthase MenF OS=Geobacillus thermocatenulatus OX=33938; GN = menF PE=3 SV=1
MAIGFRHHLQQQLHRLAVNAARPFVSWAEPWEGVDPVSFFMQGPSCGFRERFFWADRTGGTILVGLGSVYAIETEKADSRFDDVEAGRRRWEKEMEPYGAVDAPPLLFGGFSFDPYRPGTDIWRGFPAGKLVAPAALLAVRNGKTTLTVTMPTHQQGRDWERIGRLLERISGPMAAPKQLPRLVSDEEEEKERWLAAVHKAITSIRAGELDKVVLARARRLAFAKTVDAAAVLQRLREQQPFAYIFAFEQDGRCFIGASPEQLVQKEGKTCRSVCLAGSVRRGAAMEEDERLGAWLQADRKNNEEHQFVVQMIGRLFSSVCETVEMPPAPQLLKLPHIQHLCTPVVGRGCRERSVLRLVEMMHPTPALGGTPRDRALEVIRALEPLDRGWYAAPIGWVDGDGNGEWAVAIRSALLAGKEAMLFAGCGIVADSDPDSEYEETNVKMAPMLSALGVMNDG

SEQ ID NO: 93929 - protein, 458 aa, Geobacillus thermodenitrificans
  REGION 1..458: note = tr|A0A1W6VUY5|A0A1W6VUY5_GEOTD Isochorismate synthase MenF OS=Geobacillus thermodenitrificans OX=33940; GN = pchA PE=3 SV=1
MAIVSQHKIQQQLHELAANAARPFVSWTEPLEDIDPVSFFMQGPSCGFRERFFWSDRSGSTIFVGLGSAYTIETEETDGRFHYVEQQRQRWVEQIERHGEADMPPLLFGGFAFDPHQPRTSVWRGFPAGKLIAPTVLLSVKNGRTLLTVTLPTDGVERDMERIGRLFRRIEELQPVSATLPALVSDEEEEKERWLAAVRQAIASIRAGRLDKVVLARSRRLAFTGTIDAAAVLARLREQQPFAYLFAFEQDGRCFIGASPEQLVQKEGEMCQSVCLAGSVRRGSSPGEDEQLGAWLQADSKNREEHQFVVHMIRRVFSSVCETVEMPTAPQLLKLPHIQHLCTPVVGRGCQEPSVLRLVEMMHPTPALGGTPRERAMEAIRSLEPLDRGWYAAPIGWVDADGNGEWAVAIRSGLLDVDKAMLFAGCGIVAHSDPTSEYEETNVKMAPMLSALGVMSND

SEQ ID NO: 93930 - protein, 458 aa, Geobacillus thermoleovorans; identical to SEQ ID NO: 93348
  REGION 1..458: note = tr|G8N674|G8N674_GEOTH Isochorismate synthase MenF; OS = Geobacillus thermoleovorans CCB_US3_UF5 OX=1111068; GN = menF PE=3 SV=1

SEQ ID NO: 93931 - protein, 458 aa, unidentified
  source 1..458: note = Geobacillus zalihae
  REGION 1..458: note = tr|A0A1V9CN58|A0A1V9CN58_9BACI Isochorismate synthase MenF OS=Geobacillus zalihae OX=213419 GN=menF; PE = 3 SV=1
MAIGFRHHLQQQLHRLAVNAGRPFVSWTEPWEGVDPVSFFMQGPSCGFRERFFWADRTGGTILVGLGSVYAIETEKADSRFDDVEAGRRRWEKEMEPYGAADAPPLLFGGFSFDPYRPGTDMWRGFPAGKLVAPAALLAVRNGKTTLTVTVPTDKRGRDWERVGRLLERISDPMAAPKRLPRLVSDEEEEKERWLAAVREAIASIRAGALDKVVLARARRLAFAKTLDAAAVLQRLREQQPFAYIFAFEQDGRCFIGASPEQLVQKEGKMCRSVCLAGSVRRGAAMEEDERLGAWLRADRKNNEEHQFVVQMIGRLFSSVCETVEMPPAPQLLKLPHIQHLCTPVVGRGCRERSVLRLVEMMHPTPALGGTPRDRALEVIRALEPLDRGWYAAPIGWVDGEGNGEWAVAIRSALLAGKEAMLFAGCGIVADSDPNSEYEETNVKMAPMLSALGVMNDG

SEQ ID NO: 93932 - protein, 424 aa, Geodermatophilus sp.
  REGION 1..424: note = tr|A0A4Y9MJ50|A0A4Y9MJ50_9ACTN Isochorismate synthase OS=Geodermatophilus sp. DF01_2 OX=2559610; GN = E4P41_17610 PE=4 SV=1
MTAAALTSPGAVTPVVTTTPLADAPDLLALLPPAGALSWVRRGDGLVGWGEAARLEVTGPRALAEAATWWADHSAGLDVDDRTGVPGSGPVVFASIAFDPAAGTSVFVVPEVVVGRRDGVAWVTTVGDVDPAEVMDDAPEASPSPMGRLRYADGALDPASWCATVATAVERIDAGKLAKVVLARDLLVTADAPLDARSLLGRLAARFPDCWTFAVDGLLGATPELLLRRTGRQLSSRVLAGTAPRGAGADDDRLAAGLLSSAKDRAEHALAVDSLVGALDPYCTTLSAPEEPELLTLANVRHLATDVAGVQRRSGPRGGAGLLELVGAVHPTAAVCGTPTGAAAALIGELEGMDRGRYAGPVGWLDARGDGEFGLALRCAELSDGDPASARLFAGCGIVAGSDPAAELAETQAKFAAFQAALES

SEQ ID NO: 93933 - protein, 497 aa, Georgenia sp.
  REGION 1..497: note = tr|A0A5B8C955|A0A5B8C955_9MICO Isochorismate synthase OS=Georgenia sp. Z443 OX=2589797 GN=FE374_16205; PE = 4 SV=1
MTTSSSDAAGRARALRAVPAASRAAAASRAAALNGLPAVADLRARAAATATSTGSATTDDEPPESSPDLVVRTVEIPDVGDLLALLPSADPATTFSWVRRGEGIVGWGEALRLRTSGADRIRAADQAWARTVGRLHVLDEVRLPGSGAVAFGSFSFSPHSAAGGVLVVPGTVVGRRDGRSWLTTVHRVGETPSRGARLPAPAPVGEPGPVTYRDGALTPEAWRSAVAGVVRRIRAGEVAKVVMARDVVARAVAPLDVRHLLGRLAADYPGCWTFAVDHLVGATPELLVRREKGLAACRVLAGTIERTGDDAADLRRAAELARSSKDLEEHELAVASLVRALRPYCASINVPDAPFVLHLPNVMHLASDVTGAVDAALGHPSTYLSHAGGGNGPSSLALAAALHPTAAVGGTPTGLATAILASAEQMDRGRYAGPVGWIGADGDGEWGIGLRSGELSASDPHEVRLFAGCGVVAASDPDAELAETEAKLRPMREALGG

SEQ ID NO: 93934 - protein, 374 aa, Glaciibacter sp.
  REGION 1..374: note = tr|A0A4S4FJ08|A0A4S4FJ08_9MICO Isochorismate synthase OS=Glaciibacter sp. YIM 131861 OX=2565934; GN = E6C70_16240 PE=4 SV=1
MRGGDGIAGYGEALRLEFSGPDRLTDAAAAWRDVVARAQIDDDVRLPGSGLVAFGTFAFADESNATSVLIVPELIVGRRGSKAWVTRIGDGAGIDPVMRAFGDDFRVTLRAGQTSPADYVDAVSTAVGRINDDELGKVVLARDLIGRLPAGSDVRRIAAELAIGYPDCWTFCVDGMVGASPETLVRSEKGTVSARVLAGTLPRGRDDRADAEAADSLARSPKNTAEHAFAVRSVLDTLGRHTIRLQKSQPFTLRLPNLWHLATDVEGVLHDGSTSLDLVADMHPTAAVAGTPTDAALAVIRSLEKFDRGRYAGPVGWIDAHGDGEWAIALRCAQVDEDDVVHAYAGCGIVGDSDPAAELAESRIKFRPIVEALA

SEQ ID NO: 93935 - protein, 416 aa, unidentified
  source 1..416: note = Glaciihabitans sp.
  REGION 1..416: note = tr|A0A4V6MTP6|A0A4V6MTP6_9MICO Isochorismate synthase OS=Glaciihabitans sp. RP-3-7 OX=2528207; GN = EYE40_14195 PE=4 SV=1
MSEPAAVLPALTVRTLALDEIGPLVPLLDPRDPLLFVRRGQGVAGFGEAVRLEFTGEDRMREASAAWRELVSLSEVSDAVDLPGTGLIALGSFAFSRDSAATSVLIVPSVIVGRRDGKAWITRIVTTGSDAPDAPVPTPTAFGPEYRISLLPGAMKAEAFTAAVDSAIAAIAAGTVRKVVIARDLVGHLPEGADLRRVLSDLAVGYPDCFTYSVNGFIGSSPETLVRVDHGEVSARVLAGSIGRGSDADSDQDAAVALATSTKDLDEHAFALASVLRVLEPHSNTLMASELPFTLKLPNLWHLASDVEGRLSDGSSSLDLIAALHPTAAVAGAPTGEAMDLIEQLEPFDRGRYAGPVGWVGANGDGEWAVALRCAHVSSTGRITAYAGAGIVVGSEPERELAETKMKFRPIVEAFR

SEQ ID NO: 93936 - protein, 424 aa, unidentified
  source 1..424: note = Glaesserella parasuis
  REGION 1..424: note = tr|U4SHT4|U4SHT4_HAEPR Isochorismate synthase MenF; OS = Glaesserella parasuis D74 OX=1275971 GN=menF PE=3 SV=1
MSVFSQLKQQLYQQLQQKPVAQGLVQLQAEIAIDLENQQLLAWLKAQPLFPHYYWQNRDTEQTIVAVGAVQTFEHLDDVEQFSKQSDLMVVGGIEFEGQCHFVLPRLLLVKNEKNITAWLNLDGRHFESEQKECIALLAQFEQTAELHPIENSLLSTKVACDFSRWQHNIELAIEQIQQQQMNKVVLANATTKTFTHLISPYVLLFASQQKNLGCYHFLWSEKQGEAFIGSTPERLYLRQQRQFFTEALAGTVAVTDDPVKTEQNALWLLNDQKNIYENWLVVDDICSHLADCATDIQVSDAEIKRLHNVQHLRRKIQTQLTEQVSDADCLARIHPTAAVAGLPRPKAKQFIQQQECFERGWYAGALGYFTPEQAEFCVMLRSALIQANQITFYAGAGIVEKSDPQSEWQEIDRKARAMVGLME

SEQ ID NO: 93937 - protein, 424 aa, unidentified
  source 1..424: note = Glaesserella sp.
  REGION 1..424: note = tr|A0A328BVT2|A0A328BVT2_9PAST Isochorismate synthase MenF OS=Glaesserella sp. HHC-2018 OX=2094024; GN = menF PE=3 SV=1
MSLFNPLQQQLLQQLQQMPLQQGIVQLRAEIAVDLANHQLLAWLKAKSLFPHYYWQNRDTAQTLVAVGAVRAFHQLDDVEQFRQQSDLMIVGGTEFDGQCHFILPRLLLVKDETKLTACLIVDCDHLAQEQAECIALLAQFEQVSELLPIKNQWVRTQSACEFEHWQANIALAIEQIQQQQMNKVVLANATTKTFQQPISPYDLLFASQQKNLGCYHFLWSEERGEAFIGSSPERLYLRQGRHFFTEALAGTVAVTADPEQTEQNALWLLNDQKNIYENWLVVDDICSHLADCAADIQVGDAEIKRLHNVQHLRRQIQTVLAEQVSDGDCLARIHPTAAVAGLPRPTAKQFIQQHECFERGWYAGALGYFTPEQAEFCVMLRSALIKQNQITFYAGAGIVEKSDPQSEWQEIERKAQAMAGLMN

SEQ ID NO: 93938 - protein, 467 aa, Gloeocapsa sp.
  REGION 1..467: note = tr|K9XH08|K9XH08_9CHRO Isochorismate synthase; OS = Gloeocapsa sp. PCC 7428 OX=1173026 GN=Glo7428_3303 PE=4; SV = 1
MPVLPCHPHTFVYHNELYQFLSYCQQNVANDSQIVSVSLEIDSVDPLIVLQQIAEPNQQSFYFENKSKNQAIAAIDAVTKLQTCGANRFAQAQHFINSCLAQTITVGTSKDAISPHFFCSFSFFDEITQSNYPFSAATVFLPRWQISRNGDRCILVANFLIDAETNLDRLYQDWCQIVRTINFLKHTATAINNTNSIICNEEKNIKNFKKTIASCLELIESNYFQKIVLAHPLDVTYEEPIDLLRSLDNLRSIHPGCYIFAISNGKGQNFIGASPERLISIHNQQLSTDALAGSAPRGKTLAEDTMLANSLLTSAKERHEHRVVSDFITQCLYQLEITPQILPPRLRQLSNIQHLWTPIQAQLPTHVHPLEIVAALHPTPAVAGVARDKACTKIRDYETFERGLYAAPIGWLDAQGNSEFIVGIRSALIDRDRARLYAGAGIVAGSNPDREVAEIQLKLQALLKALV

SEQ ID NO: 93939 - protein, 445 aa, unidentified
  source 1..445: note = Glutamicibacter arilaitensis
  REGION 1..445: note = tr|E1VYD3|E1VYD3_GLUAR Isochorismate synthase; OS = Glutamicibacter arilaitensis (strain DSM 16368 / CIP 108037 / IAM 15318 / JCM 13566 / Re117) OX=861360 GN=menF; PE = 4SV=1
MSADSPVLSASAHQPLAPVLTSITFEYLDAPETLVADSLRHRSMVWTRNGHGLVGFGTAARLHTHGEERFARARAWFAQVVEQAQIVDPISRPGSGLVSFGSFAFSFTSVFESRMVIPQLVIGRDEEKSWITVTGSAKELEGLTYQQALARAEAAMADASAPKSAPGRIELTSGQLTAGSYLQAVDQALSRFEERGISKLVLARDVLAHSSTSIDLAGVMAALTERYGNCWTYSVDGLVGATPEMLVRVTDGLAEARVLAGTLDRAAAGAQEPGFAQRNLFEDPKQRNEHQLAIDSLTDSLNPISHGMNAPEEPFILELPNVWHLASDVRAQLRADTAGVLPTALDVAEIFHPTAAVCGTPTKKAGVLLRELEGLDRGPYAGPVGWVDSRGDGEFGIALRGGILEDEKLMRLYAGCGIVPGSVPEDELAESWAKMRPMRQALGAE

SEQ ID NO: 93940 - protein, 445 aa, unidentified
  source 1..445: note = Glutamicibacter halophytocola
  REGION 1..445: note = tr|A0A5B8IKR5|A0A5B8IKR5_9MICC Isochorismate synthase OS=Glutamicibacter halophytocola OX=1933880; GN = FQA45_06375 PE=4 SV=1
MSADSPVLSASAHQLSAPSLTSITFEYVDAPQTLLGDSLRHRSLVWTRNGHGLVGFGTAARLHTHGEERFARARAWFAQIIENARIIDPLNRPGTGLVSFGSFAFSFTSVFESRMIIPQLVIGRDEQTAWITLTGTSEELDGVTYEQALARASALMADAAIPEAAAGSIKLTSGQLTAGSYVEAVKKALRHFDERGISKLVLARDVLAHSSTPIDLSKVVHALTERYGNCWTYSVDGLVGATPEMLVRVTDGLAEARVLAGTLDRAAAGADDPGFAQHRLFEDPKQRNEHQLAIDSLTHSLNPISHGMSAPEEPFILQLPNVWHLASDVRAQLRADTTGALPSALDVAEIFHPTAAVCGTPTKKAGVLLRELEGMDRGPYAGPVGWVDSRGDGEFGIALRGGILEDEKLMRLYAGCGIVPGSIPEDELAESWAKMRPMRQALGAE

SEQ ID NO: 93941 - protein, 445 aa, unidentified
  source 1..445: note = Glutamicibacter sp.
  REGION 1..445: note = tr|A0A4Q0ALY9|A0A4Q0ALY9_9MICC Isochorismate synthase OS=Glutamicibacter sp. HZAU OX=2049891; GN = EKH49_12280 PE=4 SV=1
MSADSPVLSASAHQPSAPVLTSITFEYLDAPETLLADSLRHRSLVWTRNGHGLVGFGTAARLHTHGEERFARARAWFAQVIEQARIIDPISRPGSGLVSFGSFAFSFTSVFESRMVIPQLVIGRDEEKSWITVTGSAEEIDGLTYQQALARAESAMADASLPAAEPGSIELTSGQLTAGSYLEAVDHALGYFEERGISKLVLARDVLAHSSTPINLARVVDALTEQYGNCWTYSVDGLVGATPEMLVRVTGGLAEARVLAGTLDRAAAGAEDPDFAHRNLFEDPKQRNEHQLAIDSLTASLNPISHGMNAPEEPFILQLPNVWHLASDVRAQLRADAAGTLPTALDVAEIFHPTAAVCGTPTKKAGVLLRELEGMDRGPYAGPVGWVDSRGDGEFGIALRGGILEDEKLMRLYAGCGIVPGSVPEDELAESWAKMRPMRQALGAE

SEQ ID NO: 93942 - protein, 563 aa, unidentified
  source 1..563: note = Glycine soja
  REGION 1..563: note = tr|A0A0B2P628|A0A0B2P628_GLYSO Isochorismate synthase, chloroplastic OS=Glycine soja OX=3848; GN = D0Y65_001066 PE=4 SV=1
MAMGTVHKWLTHFTDTKKCNNILVPPASKEQQSIYFLQYHRPVYQRCHLSMNGCREGQHQYSRTRNPVGTIETKTLAPVASPAMAMYSLNMAISELESEAPFGTSSGIVRVQVPIEEQVEAIDWLLSQNHLLLPRCFFFGRKQYSPCCNGEEKLVSVAGVGSAVFFSQPHPFSYWDWISIRRFLSERCPLIRAYGAIRFNAKAKVSSEWLAFGSFYFMIPQVEFNELEGGSMLTITIAWDNNLSWSWENAINALQETLRNVSSSIVKFPKQTPPTLISSSHNIPSKVDWDLAVNGALQMIKRNDSLLTKVVLARSTRVVPTADIDPLAWLSCLKVEGENAYQFLLQPPNAPAFIGNTPEQLFHRKCLHITSEALAGTRARGASQALDCQIELDLLTSPKDDIEFTIVRDTIRRKLEAVCEKVVIKPEKMIRKLPRIQHLYSQLSGRLRSEEDEFEILSSLHPSPAVCGFPTEEAQLLIAETEVFDRGMYAGPVGWFGGGESEFAVGIRSALVEKDLGAFIYAGTGIVEGSSPYLEWDELELKTSQFTKLLKLDLPRRQKVDCK

SEQ ID NO: 93943 - protein, 380 aa, Goodfellowiella sp.
  REGION 1..380: note = tr|A0A5B2XPZ6|A0A5B2XPZ6_9PSEU Isochorismate synthase OS=Goodfellowiella sp. AN110305 OX=1892852; GN = F0L68_06955 PE=4 SV=1
MSWVRAGQGLVGWGEAARFEAHGPDRFAEVDRWWRDYVAGVDVHNELGVPGTGPTAFVSMAFADEPGHSVLIVPEVVIGQRDGVSWVTEIGRSAVTRPLAKPVRRPKRVHYTEGELTVDGYRDAVRAAVTRMKAGELGKVVLAHDVLATTDGPIDVRFLLRELAARYPNCWAYAVDGLIGATPELLLRRTGQVVSSRVLAGTTWPRPGVSDDDLAAALLGSRKDQDEHAYAVASLADTLRPFCATMTVDEQPSVLRLHNVLHLSSEVGGILDRETSLLRLSEAVHPTAAVGGTPRQLAIPLIRELEGMDRGRYAGPIGWIDGNGDGEMGVALRCAKVDGSTARLFAGCGIVADSDPDTEVREAAAKLVPMREALEGADRS

SEQ ID NO: 93944 - protein, 405 aa, Gordonia polyisoprenivorans
  REGION 1..405: note = tr|H6N1S5|H6N1S5_GORPV Isochorismate synthase; OS = Gordonia polyisoprenivorans (strain DSM 44266 / VH2); OX = 1112204 GN=GPOL_c23640 PE=4 SV=1
MISSPTSAEHTPDALGTATALSGTANDAHFLLCRNTYHVIGMGRSTVYRSAEAAASALRDGAVTAVVGALPFDIREQVSLIAPDRIELHHGRWIPQTVALGDHRAGRPVAQSRIVAAVPSPADHRRRIATAIDRLADPHDALAKVVLARALTVHSAVPVTGWEVAARLRTIDPRGSVFVTDLPGPTSGSLSQLVGASPEVLIRKRGNIVSAYPLAGSSARLTDSRLDAEQGRALANSTKDRTEHRFVVDALRAALAPLCRTLDVPDEPELMTTPTMWHLGTPIRGEIADPSTTALDLAMAVHPTPAICGTPTDLARDHIVATEGRRGFYAGAIGWAGAPTRGRDGTIVAGDGEWMVAIRCAEIAPGGREITTWAGGGIVADSDPDTELAETDAKFATILAALGIR

SEQ ID NO: 93945 - protein, 355 aa, Gordonia rubripertincta
  REGION 1..355: note = tr|A0A222TPI1|A0A222TPI1_GORRU Isochorismate synthase DhbC OS=Gordonia rubripertincta OX=36822 GN=dhbC; PE = 4 SV=1
MLSRPHGTVRGEGVVRSFTDVDGASAALREGEVESLTGAIPFDVRDPAALVAPARLRTGEPPLPGTGPLSRRAISTVLHPDAEEHRERVAHAVKRIVAGDVGKVVLARSVDLVLDEPVRPAEFVDALAGGNSGHNAFGVDVGAATGSGTWLIGASPEVLLRKSGSTVTCHPYAGSAPRSADPAVDRATADELLSSAKDLAEHAFVVDHLRERLGLLCDDIDAPTAPKLESTGEVWHLATPIRATLRDPATTALDLALLLGPTPAVCGTPSDVAAQIIRDVEGDRGFYAGAVGWCDAAGDGEWMVTIRCAELAADGRSLRTWAGGGIVEHSDPQAELDETAFKLRTVLNALGIRTI

SEQ ID NO: 93946 - protein, 365 aa, Gordonia sp.
  REGION 1..365: note = tr|A0A3N4G1Z1|A0A3N4G1Z1_9ACTN Isochorismate synthase OS=Gordonia sp. RS15-1S OX=2487349 GN=EF294_19820; PE = 4 SV=1
MSGKPVTDVGTGPAPFVLSRPHGVVRAEGIGRRFTAVSDAVSALRSGAADAVVGALPFDPTDPAALFAPGRLHREQALGGRAPVRHSLTHLVEIPDAATHRERVRRAVAAIHAGDVDKVVLARTVGAMLDSPIGIGVLLDALAHGNSEHNAFAVDTGHSWLLGASPELLLHKSGREVTCHPYAGSAPRSSDPEADREARDELAASGKDHREHAFVVEHLRERLAPISEELSVATRPQLLSTGEMWHLATPIRARLADPDVGALDLALRLSPTPAVCGTPTETAAQFIRDHEEPRGLYAGAVGWADAQGNGEWMVTIRCLELNADRQTFRTWAGGGIVADSDPDAELAETTAKLRTVLRALGVDAR

SEQ ID NO: 93947 - protein, 358 aa, Gordonia terrae; identical to SEQ ID NO: 93667
  REGION 1..358: note = tr|A0A4V6LC09|A0A4V6LC09_9ACTN Isochorismate synthase dhbC OS=Gordonia terrae OX=2055 GN=dhbC PE=4 SV=1

SEQ ID NO: 93948 - protein, 467 aa, Gracilibacillus dipsosauri
  REGION 1..467: note = tr|A0A317L2U7|A0A317L2U7_9BACI Isochorismate synthase MenF OS=Gracilibacillus dipsosauri OX=178340; GN = menF PE=3 SV=1
MIETKELNIDGVLQTARKQANKKQTPAFVSITEQIEELDPLAFFNTGKYLGLTRTFWTNTDRSIYFVGVGNAYTMQAINQPYTTIKQQWQELINDAIIDNPYPNSSAGPIVLGGFPFDQANEKDLSLWKGFEGSQFRLPRFMLTKDKEKYYFTINVFVEPNSNTSQLEQQLQIESQQLLNGKEMITYTNAIHLQHEVDPEQWKDLVQKVTNDISEGKVDKIVLARELQIELKDNCDLTEVLRNLLIMQPNSYVFAWEKNNACFIGATPERLVQVNKKQLFSTCLAGTAPRGKDKKDDDVIGQALLQDEKNQKEHQFVVDMIRGAVTSCARKVHIPDKPILYPLKNLQHLYTPVQAELKRGHTILDVVAKLHPTPALSGYPSETSLSFIREFETLERGWYGAPIGWMDDQFNGEFAVAIRSALVRENKVSLFAGCGVVEDSDPEQEYKETSIKFTPMLQALGGHYELS

SEQ ID NO: 93949 - protein, 460 aa, Gracilibacillus halophilus
  REGION 1..460: note = tr|N4WLU2|N4WLU2_9BACI Isochorismate synthase MenF; OS = Gracilibacillus halophilus YIM-C55.5 OX=1308866 GN=menF; PE = 3 SV=1
MIEIKEINIEQALQKAKTKAIEQGKRALLSIAEPIAPIDPILFFQSGSQYQVPRTFWSSADHDFFLVGIGNEMTLHANNDTYRQISVLWQELLEHTVVEHPFSNQKVGPIAFGGFPFDADTNQYWQGFEGSQFRVPRFLLTKDKDHYFLTINVMVEHDEDIETLSAQLVEDKQYLLSAPFHPLFTNAIASKQEKQTEEWKQLVRQATAEIRENKMSKVVLARQMEVTYHHEIVISQVLEHLRREQKNSYLFAWETEDACFVGATPERLVRVDEQHLLSTCLAGTAPRGESAEKDEQMGSFLMNDQKNRREHQFVVDMIQEAVRSFAENVHIPDEPQLYRLKNLQHLYTPVRAKLRDEYTILDVVAKLHPTPALSGFPRLASLHFIRKYEQMQRGWYGAPIGWIDQDFNGEFAVAIRSALVNKSSATLFAGCGVVEDSDPDIEFSETTIKFTPMLQALGGL

SEQ ID NO: 93950 - protein, 463 aa, Gracilibacillus kekensis
  REGION 1..463: note = tr|A0A1M7ML85|A0A1M7ML85_9BACI Isochorismate synthase MenF OS=Gracilibacillus kekensis OX=1027249; GN = menF PE=3 SV=1
MIETKDLDIDGVLQAAQKQSIGKAAPTFVSITEQIAWIDPIQFFQAGKGLQENRMFWSSADQSTQFVGIGDAVLLQNQDGSYHQLTNEWEQVLKNSWVDNPYDQYKTGPIAFGGFPFDSDEKVNELWKGFEGSQFRVPTFLLTVENDSAFLTTTVYVKEESNIDELSADLVTKRNQLIHAPEPIFQKNAIVLKHEVDPVQWRELVVKVTDTIEQDDVDKIVLARELQIEFEDICDIGQVLNTLKNTQEHSFVFAWEKDDVCFVGATPERLVKVDNQQLFSTCLAGTSPRGKSLKEDNWYGQQLLNDQKNREEHQFVVDMIKSAVHSCAKYVEIPDQPSLYRLKNLQHLYTPVKAELKKGYTLLDVVEKLHPTPALCGFPRESSLAFIRKFELLERGWYGAPIGWFDQHFNGEFAVAIRSALIDQDKASLFAGCGVVKGSDPEIEYQETNIKFTPMLQALGGSL

SEQ ID NO: 93951 - protein, 461 aa, Gracilibacillus orientalis
  REGION 1..461: note = tr|A0A1I4R7G2|A0A1I4R7G2_9BACI Isochorismate synthase MenF OS=Gracilibacillus orientalis OX=334253; GN = menF PE=3 SV=1
MIETKEIKIDGVLQSAQKQSIDKSAPTFVSVTEQIEWIDPIDFFQAGKAIEENRLYWSSADQKTQFVGIGDALLFHDEDASYQDLKEKWKQTLENSWIANPFSQYKTGPIAFGGFPFDAKEKVEELWEGFSGSQFRVPTFLLTSENDKSFLTMTVYVEQGSNVDQLAAELITRKNQLLHAPKPEYQENHTVLKHEVDPVEWKKLVNKATTTIYSKNVDKIVLARELQIEFDEICDIGQVLDRLQKTQKNSFIFAWEKDDVCFVGATPERLVKVDNQQLFSACLAGTAPRGKTKEEDNDFGQQLLHDQKNRNEHKIVVDMIKEAVCSFAKYVEIPEQPTLYPLKNLQHLFTPVQAELDQGYTLLDVVEKLHPTPALCGFPRESSLDFIREFEQLERGWYGAPIGWFDQYFDGEFAVAIRSALVSGDKATLFAGCGVVEDSDPEIEYQETNIKFTPMLQALGG

SEQ ID NO: 93952 - protein, 488 aa, unidentified
  source 1..488: note = Gracilimonas mengyeensis
  REGION 1..488: note = tr|A0A521AN79|A0A521AN79_9BACT Isochorismate synthase MenF OS=Gracilimonas mengyeensis OX=1302730; GN = menF PE=3 SV=1
MDSENPVLNNVKECFRQQISQIELKDAIDIVANQPVNKYHYLSVSIRIPKVDVLAVLEQHAPQKTFRYYWEKPSDEFAIAAGGQVERIQTTGDQRFREASTEGKKLLEKVHHLTKVQHHMASVHLLGGFSFFDHNIGQNWRDYGAGSFTLPEWLIINNGDLSLLTVTQKVKSGDRASDIYEQFVETINQLHEICSVEGYKIQKRPLFNSKVDTPGANSPAFKNWKESVENATELIKNEAFKKIVLARELKVQLQESVSDTHILNYLRSQYPDCYSFLVSQNGKSSFIGSTPERLASFKERHVLTEGLAGSISRGKTASEDAVLEHQLLHSHKDLSEHAFVLDAIGEHLEQYSEVYEYPEKPGIKKLSNVQHLYTPVHARIKKGVSRTEVLSRLHPTPAVGGYPREEAMPYISKLEHFDRGWYAAPIGWINTSGEGEFVVAIRSGLIKEDEVRFFAGCGIVEDSDPKKEWDETNLKFIPMLTALEHARR

SEQ ID NO: 93953 - protein, 380 aa, unidentified
  source 1..380: note = Gramella flava
  REGION 1..380: note = tr|A0A1L7I141|A0A1L7I141_9FLAO Isochorismate synthase OS=Gramella flava JLT2011 OX=1229726 GN=GRFL_0141; PE = 4 SV=1
MTKEDFFQKIQQQLKAQKAFVCYRKPGQALANLLLQQDYTAHELTDFSENGFVFAPFDRNGKTYLIPQNTSETIQFELAEVLITDEETSSDYEGSYVGAEEDQKDHELLVQKGIDAIRDQRFRKVVLSRSELVELNDPSPMPIFKKLLQKYREAFVYCWFHPKTGLWMGATPETLLQVERDRFETMALAGTQVNKGQEQIEWGQKELEEQLLVTDFILNALEGLPEIKIGEISKPYSAHAGTLLHIRTDISGKVSQAEDQSKLIEALHPTPAVCGLPRKEALEFIQKHEHYDREYYSGFLGELNFKTEKKRNGNRRNQENQQFSAILKQTSLYVNLRCMKLKDGDARIYIGGGITRDSDPAHEWMETVNKAQTMKSVLVK

SEQ ID NO: 93954 - protein, 383 aa, unidentified
  source 1..383: note = Gramella forsetii
  REGION 1..383: note = tr|A0M346|A0M346_GRAFK Isochorismate synthase; OS = Gramella forsetii (strain KT0803) OX=411154 GN=GFO_2076; PE = 4 SV=1
MIEQVDFFQKLNNHVQDQKAFVVYRKPGSNTVKSLFQKDTVSHKVSDLSESGFVFAPFNAEADSYLIPAENSNFFEFEYPAASVLDDRSNEKMSSTIDFEFMEKDQKIHENLVQEGINSIKEEKFQKVVLSRSERVQLYDPDPIRILKNLLNKYAQAFVYLWFHPDTGYWLGATPETLLNVERNRFKTMALAGTQMFKGNMDVEWEPKEVEEQKFVTDYILESLQKAKGVENINATNPYSAMAGNLLHICTDISGRLNSLDDLEELVKTLHPTPAVCGLPKEKALQFILKNEDYSREFYSGYLGELNIKSENKRNSNRRNQENQQFTAISKQTDLFVNLRCMKLKDGNARVYIGGGITKDSNAADEWMETVNKAQTMKAVLVK

SEQ ID NO: 93955 - protein, 357 aa, unidentified
  source 1..357: note = Gramella jeungdoensis
  REGION 1..357: note = tr|A0A4Y8AV30|A0A4Y8AV30_9FLAO Isochorismate synthase OS=Gramella jeungdoensis OX=708091 GN=E2488_00720; PE = 4 SV=1
MSLSSNIDTFFEKINDVYNTSVPFVVFRKPNDTKITALYQNSSALYLLKSFEESGFIFSPFNKNESKILLPSNNCNKFSAVIEKDFNVSKIVSEFKFDENLEAKNQHMSIVQDAIDFIHTNQAKKIVLSRGEKVSCNEIEVFNVLKKMLNSYKNAFVYLWFHPKVGLWMGATPERLISIDKQLNLKTMALAGTQKFNGTLEVKWEEKELLEQQYVTDYILENIKDNTYKIETKGPYTTKAGSLLHLLTDISATLKAPNLLGNLINALHPTPAICGIPQNIATEFILKNENYNRAFYSGYLGELNINDATNLFVNLRCMQIKENKANLYIGGGITNKSIAENEWDETVAKAEIMKQVL

SEQ ID NO: 93956 - protein, 432 aa, unidentified
  source 1..432: note = Grimontella sp.
  REGION 1..432: note = tr|A0A318GHB5|A0A318GHB5_9GAMM Isochorismate synthase MenF OS=Grimontella sp. AG753 OX=2183905 GN=menF; PE = 3 SV=1
MLSISVALEQLREKLSGIDANSPGFYVFDVAFALNDAFDPLTFLASQPCFPQFYWQQRSGEDEAAALGQVLRFPSLAEARHFLNDNPEHDLRAWGLNAFDPQQGELFLPRLEWRREGGRASLRLIVLNGNAQQNDVAQARSFIDALVRAKSLPDVQMELVSQHHFPQQSGWEALVTQATQAITRGEMDKVVLARATDYHFSQPVNAAAVMAASRRLNHHCFHFFIAFDPHNAFLGSSPERLWRRRGTSLRTEALAGTVGNDTDDTRATELGDWLMNDDKNQRENMLVVEDICQRLQHATSTLDVLPPQIVRLRKVQHLRRCIWTEMHHNDDAQCLTLLQPTAAVAGLPRLAARAFITQHEPFEREWYAGSAGYLSLKQSEFCVALRCAKISGTTVRLYAGAGIVAGSDPTMEWQEIENKAAGLRSLLIMKHV

SEQ ID NO: 93957 - protein, 438 aa, unidentified
  source 1..438: note = Grimontia celer
  REGION 1..438: note = tr|A0A128EZY9|A0A128EZY9_9GAMM Isochorismate synthase MenF OS=Grimontia celer OX=1796497 GN=menF PE=3; SV = 1
MTDLSQAIARLVESLSTVSPLPKQITLPFQWPERTDPIDWLHTQPLFPKFYWQTRDGTEQVLALGQVKTFSDPASAERQLVKGQRIWGGRSFDGRTERNQRCLQSFFFLPQIEMACREGQWSITLNLCDDLLKVRAALSKLITQSQRLSPPDCDVLATQHQPEFDQWSAMLGDALSAIETTELQKVVLARKTTLELDRALPAASLLKATVEINKSNFHFLLALDEKHCFVGSTPERLFWRNDSELYTEALAGTIGRGKDAEEDLSLATWLLNDSKNIYENRLVVDDITQRLNPHSEQLDVEVTPHLVRLRNVQHLKRDIEANLVADVPSSTLLDLLQPTAAVAGLPREKAVDFIVENEPFVRGWYSGSVGYLSPEQSEFCVAIRSALIVDNKVHLFAGAGIVPGSVAESEWKELDRKMATLRNLLGPSPDKHMEKKAG

SEQ ID NO: 93958 - protein, 438 aa, Grimontia hollisae
  REGION 1..438: note = tr|A0A377HL02|A0A377HL02_GRIHO Isochorismate synthase MenF OS=Grimontia hollisae OX=673 GN=menF PE=3; SV = 1
MTDLSHAIARLVESLSTMSPLPSQIAQPFCWPAHTDPMDWLHAQPLFPKFYWQTRDANEEVLALGQVRTFSDPASAEAVLAKGQRVWGGRSFDGRTERNQRCLQSFFFLPQIEVTRSGTAWEIRVNLGDDLLKVRAALSRLSCAAQHIGKPDCEVLATVHQPVFSDWSTMIDEALESIETTSLQKVVLARKTILDLDRPLSAASLLKASRDLNVSNFHFMLALDEKHCFVGSTPERLFWRHNRELYTEALAGTIGRGKDAEEDLFLATWLLNDNKNIYENRLVVDDITQRLAPYSDKVDVEQTPRLVRLRNVQHLKRDIEGVLEENVSSSTLLDTLQPTAAVAGLPRDMAVDFIAKHEPFARGWYSGSVGYLSQEQSEFCVAIRSALVVADKVHLFAGAGIVPGSDAESEWKELDRKMATLRNLLGPSPDKQMEKKAG

SEQ ID NO: 93959 - protein, 438 aa, unidentified
  source 1..438: note = Grimontia indica
  REGION 1..438: note = tr|R1GZN1|R1GZN1_9GAMM Isochorismate synthase MenF; OS = Grimontia indica OX=1056512 GN=menF PE=3 SV=1
MTDLSQAIARLVESLSTVSPLPKQITLPFQWPERTDPIDWLHTQPLFPKFYWQTRDGTEQVLALGQVKTFSDPASAERQLVKGQRIWGGRSFDGRTERNQRCLQSFFFLPQIEMACREGQWSITLNLCDDLLKVRAALSKLITQSQRLSHPDCDVLATQHQPEFGQWSTMIGDALSAIETTELQKVVLARKTTLELDRTLPAASLLKASVEINKSNFHFLLALDEKHCFVGSTPERLFWRDDSELYTEALAGTIGRGKDAEEDLLLATWLLNDSKNIYENRLVVEDITQRLNPHSEQLDVEVTPHLVRLRNVQHLKRDIEANLVADVPSSTLLDLLQPTAAVAGLPREKAVDFIVENEPFVRGWYSGSVGYLSPEQSEFCVAIRSALIVDNKVHLFAGAGIVPGSVAESEWKELDRKMATLRNLLGPSPDKHMEKKAG

SEQ ID NO: 93960 - protein, 406 aa, unidentified
  source 1..406: note = Grimontia marina
  REGION 1..406: note = tr|A0A128ETM6|A0A128ETM6_9GAMM Isochorismate synthase MenF OS=Grimontia marina OX=646534 GN=menF PE=3; SV = 1
MNTDPLDWFHSQPLFPKFYWQTRDGKEQVLALGQVKTFSEPACAESQLAKGQRIWGGRSFDGRTERDQRCLKSFFFLPQIEIVCRDGQWFITLNVCDDLLKIRATLSKLISQSQPLSHPDCEVLATQHQPEFKQWSTMMRNALSSIETTDLQKVVLARKTTLELDRALPAASLLKASLDSNKSNFHFLLALDEKHCFVGSTPERLFWRNGDELYTEALAGTIGRGKDAEEDLSLANWLLNDSKNIYENRLVVDDITQRLIPHSEQLDVEVTPHLVRLRNVQHLKRDIEASLVADVLSSTLLDLLQPTAAVAGLPRERAVDFIVENEPFARGWYSGSVGYLSAEQSEFCVAIRSALVVDNKVHLFAGAGIVPGSVAESEWKELDRKMATLRNLLGPSPEKQLEKKAG

SEQ ID NO: 93961 - protein, 438 aa, Grimontia sp.
  REGION 1..438: note = tr|A0A0F6A013|A0A0F6A013_9GAMM Isochorismate synthase MenF OS=Grimontia sp. AD028 OX=1581149 GN=menF; PE = 3 SV=1
MTNLRQAIDRIVESLLATTPLPPQLSEPFCWSMNTDPLDWFHSQPLFPKFYWQTRDGKEQVLALGQVKTFSDPACAEHQLAKGQRIWGGRSFDGRTERNQRCLKSFFFLPQIEIICRDGQWFITLNVCADLLKVRSALSKLIIQSQRLSHLDCDVLATQHQPEFGQWSTMIGDALSAIETTELQKVVLARKTTLELDRALPAASLLKASVEINKSNFHFLLALDEKHCFVGSTPERLFWRNDSELYTEALAGTIGRGKDAEEDLSLATWLLNDSKNIYENRLVVDDITQRLNPHSEQLDVEVTPHLVRLRNVQHLKRDIEANLIPDVPSSTLLDLLQPTAAVAGLPREKAVDFIVENEPFVRGWYSGSVGYLSPEQSEFCVAIRSALIVDNKVHLFAGAGIVPGSVAESEWKELDRKMATLRNLLGPSPDKHMEKKAG

SEQ ID NO: 93962 - protein, 406 aa, unidentified
  source 1..406: note = Gryllotalpicola sp.
  REGION 1..406: note = tr|A0A387BTG2|A0A387BTG2_9MICO Isochorismate synthase OS=Gryllotalpicola sp. 2DFW10M-5 OX=2419771; GN = D7I44_10085 PE=4 SV=1
MQALSVETTPLDDVRQLIPFLDARDPLLWQRRGEGIAGIGEAVRLEFAGPTRVTDAAAAWRQMAAAATVSDPLQVPGSGLVAFGTFAFADESEQASVLIVPSVIVGRRAGRSWVTTISTTDASPVAAPKPTPFGPEFRLTMASGALSAAGYGDAVASVISRIAAGDVRKVVLSRELHAHLPAGADVRRALVELALGYSDCWTFAVDGFVGASPETLVRVTAGRVDAQVLAGTAARGANSDTDAVAAAALRSSRKDRAEHAFAVDSVLESLAPHTGALETSEPFTLKLPNLWHLATDVAGPLADGSSALDLVAALHPTAAVAGTPRAAALAVIGELEPFDRGRYAGPVGWIGADGSGEWAVALRSAQIDESGDITAYAGGGIVADSDPVLEVAETTMKFRPIVEAFG

SEQ ID NO: 93963 - protein, 425 aa, Gulosibacter sp.
  REGION 1..425: note = tr|A0A1R4FJE8|A0A1R4FJE8_9MICO Menaquinone-specific isochorismate synthase OS=Gulosibacter sp. 10 OX=1255570; GN = FM112_04445 PE=4 SV=1
MNGIPRLRARTRPIADPGDLLRFADPLSPSAWLRRGDGMVGRGSAWRAEFSGPSRIRDARRAWARIVAEARVEDSIRLPGSGLIAFGAFAFSGSSAAASVLEVPEIVIGRVDGRAFMTEISVARDAADAGPVPTVPVRLPVPLPHGEDARTELEPGVMGRERHREAVASAIARIRAGEFTKVVVSRDQRGRLPEGTDRRHIVRRLAAAYPETWTYAVDGLLGASPEMLVRVIGRSVTARVLAGTLPRGADEAADLAARDALAASEKNRAEHRFAIDSAIDSLRGLDTHEDPETGLTASPEPFLLRLPNVWHLASDIRGTLPEGSSVLDLVEALHPTAAVGGTPRREAVAAIEELEPFDRRRYAGPAGWLSAAGDGEWVVALRGAEVAADGGVTAYAGGGIVDGSDPDEEFAETLPKFRPIADALG

SEQ ID NO: 93964 - protein, 395 aa, unidentified
  source 1..395: note = Gynuella sunshinyii
  REGION 1..395: note = tr|A0A0C5VJJ3|A0A0C5VJJ3_9GAMM Isochorismate synthase OS=Gynuella sunshinyii YC6258 OX=1445510; GN = YC6258_02769 PE=4 SV=1
MDILASSSHLDLAEILANDPTTFLFMSEHRKVRTSGAIAHITARAEGGVDKDSPLQMAVAEAFQRARELGQKNPIVIGAIPFDVSQPSALTVPEWYEFMPHMAVNTNQSVKLEPLTVSEYRYQPNHSDFKNMISEAVQRLKQGQLEKVVLSRILELDLSQAVDCNAILQNLIVQNPAVYQFRIPLGNNNTLIGASPELLVRKQKNSITTNPLAGTCKRMADPQQDHLNAQRLWQSTKDQHEHRLVIDTLRTQLSPLCDQLDIPAQPELIQTSNLWHLSTRIQATLKEPATNALQIACLLHPTPALCGSPAVTAKQLIDELEPHDRGLFSGIVGWCDSEGNGEWAVTIRCGLVQAKRIRLFAGAGIVADSDPESEWQETGAKLGTMLNAFNIHNGE

SEQ ID NO: 93965 - protein, 423 aa, Haemophilus aegyptius
  REGION 1..423: note = tr|A0A448MF70|A0A448MF70_HAEAE Isochorismate synthase MenF OS=Haemophilus aegyptius OX=197575 GN=menF; PE = 3 SV=1
MSYLAQAIGELKSQIHAYLQQSTNELVRFQVKLDKVDLLAWLKGQSAYPQFYLHFRDEEKALAALGAVQSFSQLNLAQEFIEESGFPLVGGLQFQGTAQFVLPKMLVEQDNKGALVSFFVKNEQSANDTLAHLKTFGNLTALSALPKQIPLHTEPRANERTWCDWVNQALVEIKSGELTKIVLANETTFHLKQAINAYDFLAESEKQNQGCYHFLWAENSHSVFVGSTPERLFAREYNLLLTEALAGTASVSESEEETQSQANWLLNDEKNLKENWLVVKDISQNLRKQVESFDVSNVELKPLRKVQHLIRKIRANLTAHYADVNILKAIHPTAAVSGLPQQQAKMILSEIETFDRGWYAGTLGVMSDVCSEFCVAIRSAFIEGHRIRVFAGAGIVAGSQPLEEWKEIERKAAGLISLFAEEK

SEQ ID NO: 93966 - protein, 425 aa, Haemophilus ducreyi
  REGION 1..425: note = tr|Q7VND2|Q7VND2_HAEDU Isochorismate synthase MenF; OS = Haemophilus ducreyi (strain 35000HP / ATCC 700724); OX = 233412 GN=menF PE=3 SV=1
MLIFDQLKQQINNQLGKTTRNLSVIEYQASVDLPPENVALLSWLKAQHQYPHFFWQARDSDLTLATIGSVKIFSSLEEAQTFVDQTHLALVGGIQFEGNCHFLLPRLQLVKNNQRLTAYFYLLEQEISEKMAIFTQTFAEFTHLSQLTLPDNQLLAHQSACDFNHWQHNIEQAISAIQQQQFNKVVLANATTLTFQHPISPYDLLAASQQTNLGCYHFIWAENATHAFLGSSPERLYQRTGNFFKTEALAGTAAVTDNLIQTELNAEWLLTDPKNIYENQLVVDDISMNLADCITQINIYPAEIKRLHNVQHLRRKIRAKLIEKINDANCLARIHPTAAVAGLPRIPAKKFIAENENFTRHWYAGTLGYFHTDHAEFTVTLRSAKIDHNQLTLYAGAGIVAESQADSEWQEIERKSLALARLLKM

SEQ ID NO: 93967 - protein, 436 aa, Haemophilus haemoglobinophilus
  REGION 1..436: note = tr|A0A1V4B010|A0A1V4B010_9PAST Isochorismate synthase MenF OS=Haemophilus haemoglobinophilus OX=733; GN = menF PE=3 SV=1
MDNLHEIKTELIRLINQYQPDLKNAFSVLHLDLNVDLNLLGWLKAQTHYPQFYLNFRDSAKKILGLGEIRRFTQVEEAQNFVQEFALSLVGGCQFNGETVFILPRLLLVQEDSLSIQLIIDNRTSWEEEKNSLLNLVQTLDQQIPLMPIHQSIQMMTAKANQSEWCLWVEKALREIEQKNLTKVVLANETRFKTDSPLNAKDFLAESEKYNTGCYHFLFAQEETQTFVGSTPERLYIRQQHCLLTEALAGTAFMTDDENINQQQTQWLLQDPKNIYENKLVADGICQHLSPYVEQITVGEVQIKQLRQVQHLKREISAQLKDGNADALCLKAIHPTAAVAGLPQKAAKAFLQKTETFDRTWYAGTLGIMDKTQSEFCVTIRSAFIEQNDIRVFAGAGIVEGSIPLLEWQEIERKALGLISLLQEEKRSIKYVSQRF

SEQ ID NO: 93968 - protein, 423 aa, Haemophilus haemolyticus
  REGION 1..423: note = tr|A0A0M3G8L6|A0A0M3G8L6_HAEHA Isochorismate synthase MenF OS=Haemophilus haemolyticus OX=726 GN=menF; PE = 3 SV=1
MSYLAQAIGELKSQIHAYLQQSTNELVCFQVKLDKVDLLAWLKGQSAYPQFYLHFRDEAKVLAALGEDRSFSQLNLAQEFIEESGFPLVGGLQFQGTAQFVLPKMLVEQDEKGALVSFFVKDEQSANDTLVHLKTFENITALSALPKQIPLHTEPRANERTWCDWVNQALVEIKSGELTKIVLANETTFHLKQAINAYDFLAESEKQNQGCYHFLWAENPYSVFVGSTPERLFAREYNLLLTEALAGTASVSESEEETQSQANWLLNDEKNLKENWLVVEDISQNLRKQVESFDVSNVELKVLRKVQHLIRKIRANLTAHYADVNILKAIHPTAAVSGLPQQQAKMILSEIETFDRGWYAGTLGVMSDVCSEFCVAIRSAFIEGHRIRVFAGAGIVAGSQPLEEWKEIERKAAGLISLFAEEK

SEQ ID NO: 93969 - protein, 430 aa, Haemophilus influenzae
  REGION 1..430: note = sp|P44613|MENF_HAEIN Isochorismate synthase MenF; OS = Haemophilus influenzae (strain ATCC 51907 / DSM 11121 / KW20 / Rd) OX=71421 GN=menF PE=3 SV=1
MYLKQNLMSYLAQAIGELKSQIHAYLQQSTNELVRFQVKLDKVDLLAWLKGQSAYPQFYLHFRDEEKALAALGAVQSFSQLNLAQEFIEESGFPLVGGLQFQGTAQFVLPKMLVEQDNKGTLVSFFVKNEQSANDTLAHLKTFENLTALSALPKQIPLHTELRANERTWCDWVNQALVEIKSGELTKIVLANETTFHLKQAINAYDFLAESEKQNQGCYHFLWAENSHSVFVGSTPERLFAREYNLLLTEALAGTASVSESEEETQSQANWLLNDEKNLKENWLVVEDISQNLRKQVESFDVSNVELKPLRKVQHLIRKIRANLTAHYADVNILKAIHPTAAVSGLPQQQAKMILSEIETFDRGWYAGTLGVMSDVCSEFCVAIRSAFIEGHRIRVFAGAGIVAGSQPLEEWKEIERKAAGLISLFAEEK

SEQ ID NO: 93970 - protein, 428 aa, Haemophilus paracuniculus
  REGION 1..428: note = tr|A0A1T0AQK3|A0A1T0AQK3_9PAST Isochorismate synthase MenF OS=Haemophilus paracuniculus OX=734 GN=menF; PE = 3 SV=1
MSIFHQLKQQLSHQIANHRPCSGVVRYQASVPFSAENLTLLRYLKAQSHYPQAFWQSRDQQRSIVAVGAVRTFDSLEQAQQFVDETGFTLVGGVQFEGQSRFILPCLLLEKTSQNLTACFHFDGQQAVSCEPFFAEWQAEFEPLQNQLIQRQTALDFSQWTHNIQQAIAEINQQNLNKVVLANATKLTFAKAINGYDLLAESVRANQGCYHFLWAENEQEMFIGSSPERLYARDQQTLQTEALAGTVAVVDDLATTERNGLWLLSDPKNSHENQLVVDDICQHFADCVNEIQIADVEIKRLHNVQHLRRPIAAKLNQGVNDRDCLRRIHPTAAIAGLPRAAAKQFIAEHEPFKRQWYAGALGFFNPTQAEFCVTLRSGRICQNQITLYAGAGIVAGSEPLSEWQEIERKAQGLSRFLFSQPTNEVKNE

SEQ ID NO: 93971 - protein, 420 aa, Haemophilus parahaemolyticus
  REGION 1..420: note = tr|A0A377I399|A0A377I399_HAEPH Isochorismate synthase MenF OS=Haemophilus parahaemolyticus OX=735; GN = menF PE=3 SV=1
MSVFTQLEQQLSEQLSQLQSTQGWIQLTAEVNLSVEESLLLGWLKSQNQHFPHFFFEKRDKNQTIATIGAVKTFSSLEKAQVFVQSTSLLLVGGIQFEGICQFVLPRLMLVKNSQNLTAYLTLNLSEQAVDFTEFFTELNSTSTVKNYQISAPQSSCTFEQWEMNIERAITQIGTGDLRKVVLANAIQLTFENLISAYDLVEQSRAINFGCYHFLWAENAQNAFVGSTPERLYYRKGNQLFTEALAGTVAVSDNPIETEQNAQWLLKDAKNIYENQLVVEDIEEHLNAYVEAFEVHLPEIKRLHNVQHLRRRIEATLKADVLDQDCLRQIHPTAAVAGLPRAKAKQFIAENEPFKRGWYAGTLGIFNPQEAEFCVTLRSAKIEHNQITLYAGAGIIKESEPVSEWQEIERKSQALSKLLG

SEQ ID NO: 93972 - protein, 426 aa, Haemophilus parainfluenzae
  REGION 1..426: note = tr|A0A369Z6R9|A0A369Z6R9_HAEPA Isochorismate synthase MenF OS=Haemophilus parainfluenzae OX=729 GN=menF; PE = 3 SV=1
MGLLEQAKSALIRQFDALATTDPQASIVHLQTKVESDVDLLAWVKGQSVYPQFYLRFRDEAKTVAAVGKVRSFSDVNLAQQFIQEHDFPLVGGLQFQGESQFILPQVLIEQQNGEAVVSVFVETNELASAKTILNLFEKMTALLPLNQLTIESVAPKANQDTWCDWVNQALTRIRQGELTKLVLANETVFRIQGELNGKDFLAVSQAENSGCYHFLWADNARNCFVGSTPERLFARDARQLFTEALAGTAPVSDNPLENDERANWLLNDEKNLNENWLVVEDISQNISHLVEQITVDDVALKPLRKVQHLIRKMQAKLTALCTDADLLKAIHPTAAVSGLPQQQAKKALAEIETFDRSWYAGTLGVMSLNLSEFCVTIRSAFIEENQVRVFAGAGIVEGSQPVEEWLEIERKAAGLISLFAENNGE

SEQ ID NO: 93973 - protein, 420 aa, Haemophilus paraphrohaemolyticus
  REGION 1..420: note = tr|A0A369ZR31|A0A369ZR31_9PAST Isochorismate synthase MenF OS=Haemophilus paraphrohaemolyticus OX=736; GN = menF PE=3 SV=1
MSVFTQLKQQLSEQLSQLQLTQEWIQLKADVDLLAEESSLLGWLKSQNQHFPHFFFEKRDENQTIATIGAVETFSSLEEAQAFVQSSSLSLVGGIQFEGLCQFVLPRLILVKNSQKLTAYLTLNISEQAVDFTDFFAEPSRSSLIQNHQILSPQPACTFEQWKANIEQAIIQIKSGDLRKVVLANATQLTFENHISAYDLVEQSREINLGCYHFLWAENAQNAFIGSTPERLYYRKGNQLFTEALAGTVAVSDNPIETEKNAQWLLKDTKNIYENQLVVEDIEAHLNTYVEAFEVHSPEIKRLHNVQHLRRRIEAILKADVLDQDCLRQIHPTAAIAGLPRAKATQFIAKNEPFKRGWYAGTLGIFNPQEAEFCVTLRSAKIEHNQITLYAGAGIVKESEPVSEWQEIERKSQALAKLLS

SEQ ID NO: 93974 - protein, 424 aa, Haemophilus parasuis
  REGION 1..424: note = tr|A0A084F0Z3|A0A084F0Z3_HAEPR Isochorismate synthase MenF OS=Haemophilus parasuis OX=738 GN=menF PE=3; SV = 1
MSVFSQLKQQLYQQLQQKPVAQGLVQLQAEIAIDLENQQLLAWLKAQPLFPHYYWQNRDTEQTIVAVGAVQTFEHLDDVEQFSKQSDLMVVGGIEFEGQCHFVLPRLLLVKNEKNITAWLNLDGRHFESEQKECIALLAQFEQTAELHPIENSLLSTKVACDFSRWQHNIELAIEQIQQQQMNKVVLANATTKTFTHLISPYVLLFASQQKNLGCYHFLWSEKQGEAFIGSTPERLYLRQQRQFFTEALAGTVAVTDDPVQTEQNALWLLNDQKNIYENWLVVDDICSHLADCATDIQVSDAEIKRLHNVQHLRRKIQTQLTEQVSDADCLARIHPTAAVAGLPRPKAKQFIQQQECFERGWYAGALGYFTPEQAEFCVMLRSALIQANQITFYAGAGIVEKSDPQSEWQEIDRKARAMVGLME

SEQ ID NO: 93975 - protein, 426 aa, Haemophilus pittmaniae
  REGION 1..426: note = tr|F9Q7Z3|F9Q7Z3_9PAST Isochorismate synthase MenF; OS = Haemophilus pittmaniae HK 85 OX=1035188 GN=menF PE=3; SV = 1
MDSLAYAAQSLAQQLREVSPKQGEIVCLCVTLKASLDGLQWLKAQHEYPQFYLTLRDCEKSYAAIGALRQFDSLDGAQNFIENTNFPLVGGLTFVGSAQFILPRILLEQSGETCQVSLFVEGNHSHEALAALEGLAQSQSLVPVAKVCVRQKRFRASPARWENWINQALDSIAEGKMSKLVLANETTFELESSLNPYDFLAESRQLNKGCYHFLWRQTADSTFLGSTPERLFARDGLQLHTEALAGTAPIGEDANAQQRWAQWLLNDDKNRLENELVVQDIAHNLQAWLATWQVADVAIKPLRTVQHLVRKISAELISSCRDADILALIHPTAAVAGLPQQAAKQRLQEIETFERDWYAGTLGLMSREQAEFCVTIRSAFIEQQQIRVFAGAGIVAGSDPLAEWKEIERKAAGLISLFATDNGEEK

SEQ ID NO: 93976 - protein, 427 aa, unidentified
  source 1..427: note = Haemophilus somnus
  REGION 1..427: note = tr|Q0I315|Q0I315_HAES1 Isochorismate synthase MenF; OS = Haemophilus somnus (strain 129Pt) OX=205914 GN=menF; PE = 3 SV=1
MDNLHEIKAEFIRLINQYQFDPKNDFSVLRLDLNEELNLLGWLKAQHHYPQFYLNFRDTNKKILGLGEICRFTQVKSAQTFVQQFNLPLIGGCQFNGEPLFILPRLSFIQEQKLVIQLIIDNKKPWEQEKYELLNIIHSLEKQVQLNPIHQSIQLITTKANQTEWCLWVEKALHEIKQKNLTKVVLANETDFKTDSPLNAKDFLAESEKYNTGCYHFLFAQNNTQAFIGSTPERLYVRKQNRLITEALAGTAFITNDEHINQQQAQWLLQDPKNIYENSLVVEGICQHLIPYVEEITVSELEIKQLRQVQHLKREISARLKAGNTDAVCLNAIHPTAAIAGLPQKEAKVFLQNTETFDRTWYAGALGIMTETESEFCVTIRSSFIEQDYIRIFAGAGIVEGSIPLLEWQEIERKALGLISLLQKETE

SEQ ID NO: 93977 - protein, 423 aa, Haemophilus sp.
  REGION 1..423: note = tr|H1LLP4|H1LLP4_9PAST Isochorismate synthase MenF; OS = Haemophilus sp. oral taxon 851 str. F0397 OX=762965; GN = menF PE=3 SV=1
MSYLAQAIGELKSQIHAYLQQSTNELVRFQVKLDKVDLLAWLKGQSAYPQFYLHFRDEAKALAAIGEVRSFSQLNLAQEFIEESGFPLVGGLKFQGTAQFVLPKILVEQDEKGALVSFFVKDEQSANDTLAHLKTFENITALSALPKQIPLHTGPRANERTWCDWVNQALVEIKSGELTKIVLANETTFHLKQAINAYDFLAESEKQNQGCYHFLWAENPHSVFVGSTPERLFVREYNLLLTEALAGTASVSESEEETQSQANWLLNDEKNLKENWLVVEDISQNLRNQVESFDVSNVELKPLRKVQHLIRKIRANLTAHYADVNILKAIHPTAAVSGLPQQQAKIILSEIETFDRGWYAGTLGVMSDECSEFCVAIRSAFIEGHRIRVFAGAGIVAGSQPLEEWKEIERKAAGLISLFAEEK

SEQ ID NO: 93978 - protein, 426 aa, unidentified
  source 1..426: note = Haemophilus sputorum
  REGION 1..426: note = tr|J4KC62|J4KC62_9PAST Isochorismate synthase MenF; OS = Haemophilus sputorum HK 2154 OX=1078483 GN=menF PE=3; SV = 1
MSILTQLKQQLCEQMAQLHANQGVVALTAEWQLTDADFSLLGWLKAQSHSFPHYFLQHRDAPQTLIGMGQMIYFDDKALAQQFVSQTGFTLLGRVAFEGKACFILPRLMGELQAAKLRFTLYIDSDQLASEQRQLALFFANFEKIEPLVFAPNTLLNRQEAISEDAWQAHVEQATHAINAHQFSKVVLANAYTLSFAHPISPYDLLQESLKTNLGCYQFLWAENSEQAFLGATPERLYAREGNQLFTEALAGTVAASSENTQTEANAAWLLNDTKNQIENQLVVEDIAIHLADEVDDFQVGQAEIKRLNHVQHLRRPIRTTLKTGVSDMRCLSRLHPTAAIAGLPRLAAKQFIAQTEPFKRNWYAGALGFVSPERSEFCVTLRSAQVHGNKLIVYAGAGIVAGSEPQAEWQEIARKSQAMIKLFHT

SEQ ID NO: 93979 - protein, 441 aa, Hafnia alvei
  REGION 1..441: note = tr|A0A377P2V9|A0A377P2V9_HAFAL Isochorismate synthase MenF OS=Hafnia alvei OX=569 GN=menF PE=3 SV=1
MVHLSVLVERIIPLLRQAAAEQSGLVRIALPCSLKDGTQMLEWLASQPLFPQFYWRHRDGAEEAAVCGAVRTFTDAEQAQKFVQENGCPELRIWGLNAFGQVELDGYGTINSLLFLPRIGLMRHAGKAELVVYLYGETSLTQDLELALRDLAALCAIQPLPTLQTDVLAARHQPDHDAWCNLLNNALAEIEHKAFEKVVLARRTTLKLSLPLRAAQFLAASRAVNHRCYHFMLALAPERAFLGSSPERLYRRQNLSLETEALAGTVASGNNDAQAQENAQWLMSDRKNQHENLLVVDDICQRLQGGAQALDVMPAEVIRLRKVQHLRRPIHATLVQSNDADCLRRLQPTAAVAGLPREPARQFIMQDEPFDRGWYAGSAGYLSQDQAEFAVALRSALIENDHIHLYAGAGIVAGSDPEQEWLEIENKAAGLRTLLESDISL

SEQ ID NO: 93980 - protein, 440 aa, Hafnia paralvei
  REGION 1..440: note = tr|A0A2A2ME63|A0A2A2ME63_9GAMM Isochorismate synthase MenF OS=Hafnia paralvei OX=546367 GN=menF PE=3; SV = 1
MVHLSALVERIIPLLRQAAAEQSGLVRVALPCSLKDGTQMLEWLASQPLFPQFYWRHRDGAEEAAVCGAVCTFTDAEQAQEFIRKNDCPELRIWGLNAFGQVELDGYGTINSLLFLPRIALMRHAGKAELVVYLYGETSLQQDLDIALHDLADLCQIQPLPPLQTVVLAAHHQPEHDAWCNLLNHALVEIEHKAFEKVVLARRTTLKLSQPLRAAQFLSASRAVNHRCYHFMLALAPERAFLGSSPERLYRRQQLSLETEALAGTVASGSSDAQAQENAQWLMSDRKNQHENLLVVDDICQRLQGGAQALDVMPAEVIRLRKVQHLRRPIHATLIHDNDADCLRRLQPTAAVAGLPREPARQFIMRDEPFDRGWYAGSAGYLALEQAEFAVALRSALIQGDHIHLYAGAGIVAGSDPEQEWLEIENKAAGLRTLLETEFS

SEQ ID NO: 93981 - protein, 469 aa, Halalkalibacillus sp.
  REGION 1..469: note = tr|A0A2I0QUV8|A0A2I0QUV8_9BACI Isochorismate synthase MenF OS=Halalkalibacillus sp. B3227 OX=2018042; GN = menF PE=3 SV=1
MEGQLMLQTQQNSIDKQLKELQNQMIDDNKEYSVSVVEQIEPIDPVDFFAKFESFQGQRMLWKSADDEYAYVGIGVQKAFQDKHEQGRFESIQSQWKEFLENTLISSDITQKGTGPTLLGGFSFLEKSISSDIWAAFPSSYMQLPKVMLTNYNGNSYLSYNVTLSQQSDIKNVSDQLAKWKRPIVHHSSSAESNRLLSKSSSPYQDWEALINDAVSQIKNGEMGKVVLARQLEADFEHKITTLEVLNRLYKQQKDSYIFAVENGEDTFIGASPEQLVNVEGQRLSSACLAGTTSRGNTIESDEQLASELFYDEKNRQEHHYVVEMMREAISPLCENVEIPDDPTIYPLRALQHLYTPVQAQLKQDYNVLDVVKHLHPTPALGGEPREKALEFIEKNEQLDRGWYAAPVGWMNHHWDGEFAVGIRSGLIRNHKAILFAGCGIVEDSDPEAEFNETELKLKPMLEALGGTS

SEQ ID NO: 93982 - protein, 455 aa, unidentified
  source 1..455: note = Halanaeroarchaeum sulfurireducens
  REGION 1..455: note = tr|A0A0N9N9Z2|A0A0N9N9Z2_9EURY Isochorismate synthase OS=Halanaeroarchaeum sulfurireducens OX=1604004; GN = menF PE=4 SV=1
MASRDGQDRVQTAGRLVSRSVSIPPTALRDVLRLDRPIHAAVTAPDGPTVVASGSAATATAEGADRFAGIRETATTVYETVDDDSVPDGARPRFVGGFAFHDRHERAHPWDDFPGAWFALPSVQIVLGEDGGWITATGNRDERSPSEIVATAESVRDGLVSGGPAEETPGVSSVVRETTLEEWTEQLEGALSRIDAGDIEKVALAQTLRANLEAQFPLASVIERLGETYPDCFLFALRPGAGYTEPTHSGEQAPPVPTFFGASPERLVTKAGDTVRTGALASTVGRGDTETEDDRLADRLRTDEKFQREHRVVVESIREQLTPVARNVQTGSRTVRRLDSVQHLYTPIEATATADHVLAVVTALHPTPAVGGLPPDVALETIRNTETFDRGWYAAPVGWFDEEGDGTFAVGIRSAVGEDREATLFAGNGIVADSDPVAEWEEVQLKYEPILDALR

SEQ ID NO: 93983 - protein, 448 aa, unidentified
  source 1..448: note = Halapricum salinum
  REGION 1..448: note = tr|A0A4D6HGL3|A0A4D6HGL3_9EURY Isochorismate synthase OS=Halapricum salinum OX=1457250 GN=DV733_13845; PE = 4 SV=1
METLRGDEAVGTASDLTVVARSHELDDVDHAALLAEVSRPSVVWRDGEEAVVTTGATASITANGPDRFATVRETATALFDRLRTPATPQPARPRLFGGFAFHDGAADRGPSTWDGFPDAWFVLPTVQVTTSGDRCWLTVTATGPDADRQATDRLERWRERLSDLPTHEPTGRPGIVDQHRTPSREDWREQVEDAVADIRSGTLRKVVLAQSLSVGLERPLSIPDALSRLDTRYPDCVRFAVTTESEAAGTLFGATPEKLVSLSGRTVQTEALAGSTGRGETPAEDEWLGEELLDSDKDNHEHDLVVEAIRDQLDPVASSVQTGDRILRRLATVQHLQTPIRATLESDRHVLDLVEALHPTPAVGGLPPDAALETIKSTEAFDRGWYAAPVGWMDAAGNGTFAVAIRSALARERTASLFAGAGIVHDSDPDREWDEVQLKYRPMLDELE

SEQ ID NO: 93984 - protein, 455 aa, Halarchaeum sp.
  REGION 1..455: note = tr|A0A3M9JT33|A0A3M9JT33_9EURY Isochorismate synthase OS=Halarchaeum sp. CBA1220 OX=1853682; GN = EFA46_08255 PE=4 SV=1
MDQREGVARADTAGLVSRTVRLPDASLSGLLRTLGKPNAVWTAPGEPTVTGYGAAAQVTAEGPARFAAVRERAGAVFESVDRPADAPAVARPRFLGGFAFHDGHSATAHWAGFPTAAFVLPHVQVVTTPEATWLTVNAQGERASVERVEATITSVRERFDPEEHAADPPPGVVSTARTTSRAEWRRQVEAATARIRAGDLEKVVLAQALDVTLDAAFSLPDALERLGETYPECFRFAFRPTDGATFFGASPERLVTRDGRELRTGALAATVGRGETPDDDQQLEADLRSSAKYRHEHEVVAERIREQLRGVASDVATGERSVRKLATVQHLFTPITGETDEHVLSLAEALHPTPAVGGLPPDAALDVIRETETFDRGWYAAPVGWFDGSGDGTFAVALRSALARGEHVRPFAGAGIVADSDPDAEWAEVQLKYRPILDVFERAGDATPDAGGGDR

SEQ ID NO: 93985 - protein, 445 aa, Haloarcula hispanica
  REGION 1..445: note = tr|G0HRA0|G0HRA0_HALHT Menaquinone-specific isochorismate synthase OS=Haloarcula hispanica (strain ATCC 33960 / DSM 4426 / JCM 8911 / NBRC 102182 / NCIMB 2187 / VKMB-1755) OX=634497 GN=menF PE=4 SV=1
MEPLRGDETTVGETTVVARGCRLDDAPVRAVLETDARPRFFWAAGTESIAARGSAATVTADGQSRFDDVRTAVEALFADCSVPDDLPSVARPRAFGGFAFHNGTHEGEDSPWDGFPSAAFFLPEIQVTRRDDDAWLTTVATGPEAATEAETLLEEWRDRLVADSERNPGTPPGISHRKRTPTQDGWREQVAAATESIDRGELQKVVLAQSLSATLDAELSVPDVMARLSKTYPDCYRFMLSPDSGGTFFGATPERLVSVRGRTVRTEALAGSTGRGDTPAEDEWLAAELLDSEKDRHEQKLVADAIRDQLKPFASTVRIGDRTVRRLATVQHLRTSITAELDDDEHVLSLVEALHPTPAVGGLPPDAALRTIRETEAFDRGWYAAPIGWVDAAGNGTFAVGIRSAVATEREATLFAGAGIVADSDPDREWDEVQLKYRPILDELE

SEQ ID NO: 93986 - protein, 445 aa, Haloarcula marismortui
  REGION 1..445: note = tr|Q5V3T3|Q5V3T3_HALMA Isochorismate synthase; OS = Haloarcula marismortui (strain ATCC 43049 / DSM 3752 / JCM 8966 / VKM B-1809) OX=272569 GN=menF PE=4 SV=1
MEPLRGDETTVGETTVVARGCRLDDAPVRSVLVTDARPRFFWAAGTESIAARGSAATVTADGQSRFDDVRTAVEALFDDCSVPDSLPSIARPRAFGGFAFHNGTHEGEDSPWDGFPSAAFFLPEIQVTRRDDDAWLTTVATGPEAATEAEALLEEWRDRLVADSERNPGTPPGISHRKRTPTQDGWREQVAAATESIDRGELQKVVLAQSLSATLDAELSVPDVMARLSKTYPDCYRFMLSPDSGGTFFGATPERLVSVRGRTVRTEALAGSTGRGDTPAEDEWLAAELLDSEKDRHEQKLVADAIRDQLEPFASTVRIGDRTVRRLATVQHLRTSITAELDDDEHVLSLVEALHPTPAVGGLPPDAALRTIRETEAFDRGWYAAPVGWVDAAGNGTFAVGIRSAVATEREATLFAGAGIVADSDPDREWDEVQLKYRPILDELE

SEQ ID NO: 93987 - protein, 445 aa, Haloarcula sp.
  REGION 1..445: note = tr|A0A421E8I7|A0A421E8I7_9EURY Isochorismate synthase OS=Haloarcula sp. Atlit-47R OX=2282132; GN = DVK00_15165 PE=4 SV=1
MEPLRGDGTTVGETTVVARGCRLDDAPVRAVLETDARPRFFWAAGTESIAARGSAATVTADGQSRFDDVRTALEALFDDCSVPDSLPSIARPRAFGGFAFHNGTHEGEDSPWDGFPSAAFFLPEIQVTRRDDDAWLTAIATGPEAATEAETLLGEWRDRLATDTEREPGTPPGISHRKRTPTQDGWREQVSAAIASVDCGDLQKVVLAQSLRVALETDLSVPDVMARLSRTYPDCYRFMLSPEAGGTFFGATPERLVSVRGRTVRTEALAGSTGRGDTPAEDEWLAAELLDSEKDRHEQKLVADAIRDQLEPFASTVRIGDRTVRRLATVQHLRTSITAELDDDEHVLSLVEALHPTPAVGGLPPDAALRTIRETEAFDRGWYAAPIGWVDAAGNGTFAVGIRSAVATEQKTTLFAGAGIVADSDPDREWDEVQLKYRPILDELE

SEQ ID NO: 93988 - protein, 467 aa, Halobacillus aidingensis
  REGION 1..467: note = tr|A0A1H0VG57|A0A1H0VG57_HALAD Isochorismate synthase MenF OS=Halobacillus aidingensis OX=240303; GN = menF PE=3 SV=1
MLHTKAPHIEEMVGEALQKAHHLGEPLFISIVEHIDDQNPFQFFETGQHIDQHRSFWQSAENDLTMVGIGKASQLYAKSKQRFREVQSLWKHLQENAMLHDDYNKKGTGMVALGGFSFDPEQKEDTPWESFPDSKMTIPAFLLTKVDGETYLTINALIFPEDHQQQIAHQIQDHRDLLLNEGEVSGSLPVIDQTFEVAPEAWKESVKKATDDITAGLMEKVVLARELRVTFKEDVQIAAVLKALADTQPNSYIFCYESEGDHFIGATPERLAKVEDRELVSTCLAGTIPRGRTEQEDLKLGEELLGDPKNLQEHQFVVEMIKEAVEACSSQVEVPNGPVLYPLRNLQHLYTPVRAVLDQGYTLLDVIEKLHPTPALGGMPQRVSVEYIRTHETLNRGWYAGPIGWFDAQDNGEFAVAIRSALIQQKEASLFAGCGVVEDSDPEAEYAETAVKLKPMMNVLGGSEWDM

SEQ ID NO: 93989 - protein, 463 aa, Halobacillus alkaliphilus
  REGION 1..463: note = tr|A0A1I2NHQ5|A0A1I2NHQ5_9BACI Isochorismate synthase MenF OS=Halobacillus alkaliphilus OX=396056; GN = menF PE=3 SV=1
MLHTQAPQIDEIIEKAINQAQERNEPQLISVVDQIEPSDPFQFLDAGTSINNHCLFWRSAEEDFTMVAVGTAYKMYAENKNRFKEIQVMWDNIHQSASTYDEFNEKGTGIVALGGFSFDSKQNEQVPWEAFPDSQMTIPAFLLTNKGPESYLTTNVLIFPEDHKQQIITQLSNHRETLLKAGHQTFELPVRKDSEEIDPSGWKKSIEQATEDIKKGLLDKVVLARELRISFNDPVQLAAVIEALAATQPNSYIFAFESEGEYFVGATPERLAKLDKQQLVSTCLAGTTRRGKTKEEDVQLGEELLYDPKNRQEHQFVVEMIRQAVEACCYNVQIPEAPVLYPLKNLQHLYTPVTAVLEKGYTLLDVIEKLHPTPALGGMPQKKSVDYIRTNEKLNRGWYAGPIGWFDMHNNGEFAVAIRSALIKSDKASLFAGCGVVEDSDPDAEYEETHVKLKPMLSVLGGC

SEQ ID NO: 93990 - protein, 463 aa, Halobacillus dabanensis
  REGION 1..463: note = tr|A0A1I3QYY8|A0A1I3QYY8_HALDA Isochorismate synthase MenF OS=Halobacillus dabanensis OX=240302 GN=menF; PE = 3 SV=1
MLHTKTPIIEEWIGEALQKAHHLGEPLFISIVEQIDNQDPFQFFDAGKDIDQHRTFWQSADSDFTIVGVGKASQLYAKSTHRFQEVQSLWNQLQENAMVHDEYNIKGTGMVAIGGFSFDPEQQDQSPWGSFLDTQMTVPAYLMTQVNGESYLTINALIFPEDHLQQISNQVLSHREMLLRQQDSTTHLPSIKEAYEIAPNDWKNSVKQATEDIKAGLIEKVVLARELRVSFEEDAHIASILKTLADTQQNSYIFAYESDGDYFVGATPERLAKLEERELVSTCLAGTIPRGRTEEEDQLFGQELMNDPKNRQEHQFVVEMIREAVEACSSHVSIPEAPVLYPLKNLQHLYTPVRAKLDEGYTLLDVIEKLHPTPALGGMPQKESVEYIRIHETLNRGWYAGPIGWFDAGNNGEFAVAIRSALIQKDEASLFAGCGVVEDSDPEAEYEETSVKLKPMLSVLGGS

SEQ ID NO: 93991 - protein, 467 aa, Halobacillus faecis
  REGION 1..467: note = tr|A0A511WTI2|A0A511WTI2_9BACI Isochorismate synthase MenF OS=Halobacillus faecis OX=360184 GN=menF; PE = 3 SV=1
MLHTKAPQIEEVVGEALQKAHHLGEPLFISIVEHIDDQDPFQFFETGQHIDQHRSFWQSAENDLTMVGIGKASQLYAKSKQRFREVQSLWTQLQENAMVHDDYNKKGTGMVALGGFSFDPEQKEDTPWESFPDSQLTIPAFLLTKVEGETYLTINALIFPEDHQQQIANQIQNHRDSLLKKGEVTGSLPVIEQTFEVAPEAWKESVKKATEDITAGLMEKVVLARELRITFKENVQITAVLKALADTQPNSYIFCYESEGDHFIGATPERLAKVEERELVSTCLAGTVPRGRTEEEDFKLGEELLGDPKNRQEHQFVVEMIKEAVEACSSQVEVPNGPVLYPLRNLQHLYTPVKAVLDQGYTLLDVIEKLHPTPALGGMPQQVSVEYIRTHETLNRGWYAGPIGWFDAQDNGEFAVAIRSALIQQKEASLFAGCGVVEDSDPEAEFAETAVKLKPMMNVLGGSEWDM

SEQ ID NO: 93992 - protein, 463 aa, Halobacillus halophilus
  REGION 1..463: note = tr|I0JPY7|I0JPY7_HALH3 Isochorismate synthase MenF; OS = Halobacillus halophilus (strain ATCC 35676 / DSM 2266 / JCM 20832 / NBRC 102448/ NCIMB 2269) OX=866895 GN=menFPE=3; SV = 1
MLHTQAPQINEIIEKAINQAQERNEPQLISVVDQIEPSDPFQFLDAGTSINNHCLFWRSAEEDFTMVAVGSAYKMYAENENRFKEIQVMWDNIHQSALTYDEFNEKGTGIVALGGFSFDSKQNDQVPWEAFPDSQMTIPAFLLTNKGPESYLTTNVLIFPEDHKQQIITQLSNHRETLLRAGHKTFELPVRTNSEEIDPSGWKKSIEQATEDIKKGLLDKVVLARELRISFNDPVQLAAVIEALAATQPNSYIFAFESEGEYFVGATPERLAKLDKQHLVSTCLAGTIRRGKTKEEDVQLGEELLYDPKNRQEHQFVVEMIRQAVEACCYNVQIPKAPVLYPLKNLQHLFTPVTAVLEKGYTLLDVIEKLHPTPALGGMPQKKSVDYIRTNEKLNRGWYAGPVGWFDMHNNGEFAVAIRSALIKSDRASLFAGCGVVEDSDPDAEYEETDVKLKPMLSVLGGC

SEQ ID NO: 93993 - protein, 467 aa, Halobacillus karajensis
  REGION 1..467: note = tr|A0A024P9C8|A0A024P9C8_9BACI Isochorismate synthase MenF OS=Halobacillus karajensis OX=195088 GN=dhbC; PE = 3 SV=1
MLHTKAPQLEEMIGEALQKAHHLGEPLFISIVEHIDDQDPYQFFEAGLDIDQHRSFWQSAENDLTMVGVGKASQLYAKSRQRFREVQSLWGELQEKAFVHDNYNQKGTGMVALGGFSFDPEKQEKTPWDNFSDSQMTIPAFLLTKVDGQSYLTINAMIFPEDHYQQIITQIKDHKHRLLHQGEWTHSLPFIDQLYEMVPEAWKRSVKQATEDIKAGLMEKVVLAREVRLTFKGDAHITSVLKALAQTQPNSYIFCYESEGSHFIGATPERLAKLDDRELVSTCLAGTIPRGLSEEEDQKLGEELLNDPKNRQEHQFVVEMIKEAVEACSRKVEVPDGPVLYPLRNLQHLYTPVKAVLDEGYTLLDVIAKLHPTPALGGLPQKVAVDYIRTHETLNRGWYAGPIGWFDAQDNGEFAVAIRSALIQKDEASLFAGCGVVEDSDPEAEYEETAVKLKPMMSVLGGSEWDM

SEQ ID NO: 93994 - protein, 463 aa, Halobacillus litoralis
  REGION 1..463: note = tr|A0A410MGL8|A0A410MGL8_9BACI Isochorismate synthase MenF OS=Halobacillus litoralis OX=45668 GN=menF; PE = 3 SV=1
MLHTKAPHIEELIGEALQKAHHIGEPLFISIVERIDAQDPFQFFEAGSAVDTHRSFWQSADNDFTMVGVGKGSQLYAKSEQRFQEVQSLWNELQENAIIHDDYNKKGTGMVALGGFSFDPLEAETTPWESFPDSQLTIPAYLLTNVDEESYLTINAVIFPEDHPQQIANQILSQRELLFEAEMKAVQLPEIKKTVEISPEDWKVSVRKATEDIKAGMIEKVVLARELRLSFHEDTHITSILRTLAETQSNSYVFAFESNGDHFIGATPERLAKVDERKLVSTCLAGTTPRGKSEEEDMLLGQELLADPKNRQEHQFVVEMIREAVEACSSQIEIPEAPILYPLKNLQHLYTPVKAILDQGYTLLDVIEKLHPTPALGGMPQKKSVSYIREHETLNRGWYAGPVGWFDIRNNGEFAVAIRSALIQQDEASLFAGCGVVEDSDPEAEYEETAVKLQPMRSVLGGF

SEQ ID NO: 93995 - protein, 463 aa, Halobacillus mangrovi
  REGION 1..463: note = tr|A0A1W5ZTX5|A0A1W5ZTX5_9BACI Isochorismate synthase MenF OS=Halobacillus mangrovi OX=402384 GN=menF; PE = 3 SV=1
MLHTKTSHIEEIIGEAIEKARHYTEPQLISVVDQIDYIDAYQFMDHGQVVDYHRLFWRSAEEDFTMVGVGTASKLFATSERRFKEVQSLWNEIREHAVIYNRYGEKGTGVVAIGGFSFDSKQKNASPWEAFPDSQMTIPAYLLTNKSGKSFLTTNVMIFPEDHQQQIVNQIADHHEKLLSLTDHDFQLPERTNTSEVAPELWKASVKEATDDIKKGLLEKVVLARELRISFSEPVQIAGVLKALAESQDNSYIFGFESEGDYFVGATPERLAKVDKRELISTCLAGTVPRGGTEEEDQHLGRDLLHDPKNRQEHQFVVEMIKEAVEACATNVDIPEEPVLYPLKNLQHLYTPVRATLDEGYTILDVIEKLHPTPALGGLPQQSSVEYIRHHETLNRGWYAGPIGWFDDHNNGEFAVAIRSALIQNDSASLFAGCGVVEDSDPQAEYEETAVKLKPMLSVLGGY

SEQ ID NO: 93996 - protein, 463 aa, Halobacillus salinus
  REGION 1..463: note = tr|A0A4Z0GZD8|A0A4Z0GZD8_9BACI Isochorismate synthase MenF OS=Halobacillus salinus OX=192814 GN=menF; PE = 3 SV=1
MLHTRVPHIEEIIGEAIKKAKQSDQPQLVSVVDRIDYTDPYSFLYAGQGIDQHRLFWKSAEEPFTLVGVGAVTRMTSTDQNRFTQLQAEWNSLIDGAITYDEFGQKGTGIVSMGGFSFDPEEKNERPWESFEESRLTVPAFLLTNHGYQSYLTSNFMIYPEDHQKQIIREWKDNWDELLDTQDFQFQLPVRSGEKEIDPEEWKESVLQATVDIKRGVLEKVVLARELQVKFEQPVQLEAVLKALAETQTNSYIFSFESNGEHFIGATPERLAKLEQQQLISTCLAGTIPRGHTEEEDRKLGQELLYDPKNRQEHQFVVEMIKEAVEACSHDVQIPKAPVIYPLRNLQHLYTPVSATLDPGYTLLDVIERLHPTPALGGLPQKKSVEYIREYESLNRGWYAGPVGWMDDRNNGEFAVAIRSALLQGDKASLFAGCGVVEDSDPIAEYEETAVKLQPMLSVLGGC

SEQ ID NO: 93997 - protein, 463 aa, Halobacillus sp.
  REGION 1..463: note = tr|A0A0B0CY40|A0A0B0CY40_9BACI Isochorismate synthase MenF OS=Halobacillus sp. BBL2006 OX=1543706; GN = menF PE=3 SV=1
MLHTKTSQIEEIIGEAIAKARQYKEPQLISVVDQIDYNDPYQFMDNGQAVDDHRLFWKSAEEDFTLVGIGTASKLFATNERRFREVQSLWNEIREHAVIYNRYGEKGTGIVALGGFSFDPQQGESSPWEAFPDSQMTIPAYLLTNKNGQSFLTTNVLIFPEDHQQQIVNQIADHREKILNYSQRDLRLPERTKAVEVSPEEWKRSVKAATDDIKKDLLEKVVLARELRVSFQEPVQIAAVIQALAETQDNSYIFAFESEGEYFVGATPERLAKVEKRELVSTCLAGTVPRGRTEAEDHHLGQGLLNDPKNRSEHQFVVEMIRGAVEACSTNVHIPGEPVLYPLRNLQHLYTPVRATLDEGYTILDVIERLHPTPALGGMPQKESVEYIRHHETLNRGWYAGPIGWFDDHNNGEFAVAIRSALIQHDSASLFAGCGVVEDSDPEAEYEETAVKLKPMLSVLGGC

SEQ ID NO: 93998 - protein, 467 aa, Halobacillus trueperi
  REGION 1..467: note = tr|A0A3D8VRK2|A0A3D8VRK2_9BACI Isochorismate synthase MenF OS=Halobacillus trueperi OX=156205 GN=menF; PE = 3 SV=1
MLHTKAPHIEEMVGEALQKAHHLGEPLFISIVEHIDDQNPFQFFETGQHIDQHRSFWQSAENDLTMVGIGKASQLYAKSKQRFREVQSLWKHLQENAMLHDDYNKKGTGMVALGGFSFDPEQKEDTPWESFPDSKMTIPAFLLTKVDGETYLTINALIFPEDHQQQIAHQIQDHRDLLLNEGEMSGSLPVIDQTFEVAPEAWKESVKKATDDITAGLMEKVVLARELRVTFKEDVQIAAVLKALADTQPNSYIFCYESEGDHFIGATPERLAKVEDRELVSTCLAGTIPRGRTEQEDLKLGEELLGDPKNLQEHQFVVEMIKEAVEACSSQVEVPNGPVLYPLRNLQHLYTPVRAVLDQGYTLLDVIEKLHPTPALGGMPQRVSVEYIRTHETLNRGWYAGPIGWFDAQDNGEFAVAIRSALIQQKEASLFAGCGVVEDSDPEAEYAETAVKLKPMMNVLGGSEWDM

SEQ ID NO: 93999 - protein, 448 aa, unidentified
  source 1..448: note = Halobacteriovorax marinus
  REGION 1..448: note = tr|E1X1B2|E1X1B2_HALMS Putative menaquinone-specific isochorismate synthase OS=Halobacteriovorax marinus (strain ATCC BAA-682 / DSM 15412 / SJ) OX=862908 GN=menF; PE = 4 SV=1
MINLLELKHSVIRQLSEHWKQVDFDNLSKDKKRFVTYKFKIEKTKLSNLLGHVIHRPLNYFKSKDNSKEILGIGSHITYTKKYDYNKLLGLIESDNDLVFLGAQRFDSNTKRDDAWSGFDECHFTLPKIIFETTPESTVLKVVFNKKSISTEDKRSNALFELEAYLNFIRHEFTVTKPREVATYPSKDQWSNMVDYCLNTLSTTPLEKVVIARKEIVEFDRLADPMAIFEKNMKNANDSYLMYLDPGDGKVFMSFTPEKLFKLNNREISLDCLAGTRPRSNDFEADLKFQSELMSSAKELNEHRIVTREIQEKLSNLGADVRVENKESILKLKFIQHLHTHINATLPERSNFAVLLNTFHPTPAVGGRPWEMAKKCIEQAEPFDRGLYAGPMGYISAESCEFAVAIRSALTEETKLHLFGGCGLVTGSEAESEWVETQNKMKNFEITL

SEQ ID NO: 94000 - protein, 457 aa, unidentified
  source 1..457: note = Halobacteriovorax sp.
  REGION 1..457: note = tr|A0A4Z0KV47|A0A4Z0KV47_9PROT Isochorismate synthase OS=Halobacteriovorax sp. Y22 OX=2505978; GN = EP118_07810 PE=4 SV=1
MRLAANNLQIDIINQLIKLDPNDERLVKGPIYTLFKLEAGFNNISSIIDLFQTYRKFYFLNKDKDCEFLALGSWQDFNSLYHYEDIENLTREHDFLKICGAQRFKSEPDCLEWHGLEDCSYFVPKVIIDGGNQGVDIKIILPNSYFEDDNAKKEALHKLAISLEPNPKHMHSEYNYITKSISATSKTQWGKMVNEAVSKIKEQDLKKVVLSRKLKFTFKHPICAYEQFKTLKENNTNNSYNILFQFSANQCFYSVTPETLFKMQGRNVYIDSLAGTIKRGKNKQEDEFLEKTLLSNEKELEEHRHVSSYIEGALKKLTKDLHITKKEEILKLKYIQHIHSKYEGVLSDDAKASDIITGLHPTPAVAGLPKKESIEQIDQLEKSSRGLYAAPIGFFSKEKTEFAVGLRCALADKQDLHIYAGCGIVKDSSPEKEWNETTNKMRNFTEVIKAKSWTNFQ

SEQ ID NO: 94001 - protein, 442 aa, unidentified
  source 1..442: note = Halobacterium hubeiense
  REGION 1..442: note = tr|A0A0U5H3T5|A0A0U5H3T5_9EURY Isochorismate synthase OS=Halobacterium hubeiense OX=1407499 GN=menF; PE = 4 SV=1
MSSLSGEAAARGAVVSRSCRVADVSYRAFLAARDAPRIHWADPDGLELSGVGDAATVTASGADRFEAVREWATALFDDTDHDGPEVARPRLLGGFAFRDDHAPEGTWSGFPAAQFVLPAVQLASAGDETWLTVTRAGEDVDPKAVEATLADAREEIEALPAMQPSGPRPGVESTTTTSDEAAWREQVERAVERIEAGDLRKVVLATALRADLADDLDPRDLLERLRQSYPSCFRFLVEPTGDAAFLGATPERLVTLDDDSVQTVALAGSVGRGDTPEEDAELAAQLRDSEKIRHEQRLVTDTIAAQLGAFGDVSVGERSVRKLSNIQHLNTPITTDVSKDTHVLDVAEALHPTPAVGGLPPDAALDVIRETETFDRGWYAAPVGWFDGDGDGTFAVGLRSAVARDRTVTMFAGNGIVADSDPNEEWAEVQLKFQPILDELRR

SEQ ID NO: 94002 - protein, 441 aa, Halobacterium salinarum
  REGION 1..441: note = tr|B0R4U2|B0R4U2_HALS3 Isochorismate synthase; OS = Halobacterium salinarum (strain ATCC 29341 / DSM 671 / R1) OX=478009 GN=menF PE=4 SV=1
MSSLAGETTADGPVVATSCRVADVSTRAFLAAHAEPGFHWADPDGLELSGAGTAASVTAAGGDRFAAVREWSTGLFADLTHDGPDAARPRLFGGFSFFDTHTAAGVWQGFPPARFVLPAIQLTSVGDETWLTAIEAGPDATVASASASLADARDAVDSLPAMQAAGPRPGVTDTTPTPGRDAWTAGVQDAVDRIQSGPLRKVVLATALRADLAEPATPCALLERLRQRYPACFRFLVAPADGGVFLGATPERLASLRGGRVETVALAGSVGRGDSPAADARLADRLRESDKLRHEQGVVVDTIARRLEGIGDVAVGDRDVRQLSTIQHLETPISAAVSADTHVLDVIETLHPTPAVNGLPPADALATIRDTETFDRGWYAAPIGWIDADGDGTFGVGLRSGVVDDDSVTLFAGNGIVGDSTPDAEWEEVQLKYRPVLDELQ

SEQ ID NO: 94003 - protein, 456 aa, Halobellus sp.
  REGION 1..456: note = tr|A0A498F8D5|A0A498F8D5_9EURY Isochorismate synthase OS=Halobellus sp. Atlit-31R OX=2282130; GN = DVK02_12470 PE=4 SV=1
MESLRTDAAGTHLVSRSVPIAAPSFRAVLREADTPRTVWNAPNEATVVGSGAAATLTADGPARFDSIREAAETLFASGDVHAGTEAARPRLFGGFAFHGDSASGPPWEDFPGARFVFPHVQVTWTDGDDPDADAWVTVNAVGDDVDPDTVEAALADARDRIESLPEADPPAGPPGVSGRRRTTARDDWTEGVEAAVSRINSGDLEKVVLAQALDVDLETELSLPDVLPRLAEKYPDCYHFLIEPEPADARAQSSFFGAAPERLVSVRGRTVETDALAGTTGRGETPAEDEWLAQELARDEKNAHEHDLVAETIETQLAPFAASVSPGPRRIKRLATVQHLWTPITATLDRDEHVLSLVEALHPTPAVGGLPPEAALDTIRETEPFDRGWYAAPVGWIDAAGYGTFAVALRSAVAQGDVATLFAGVGIVPDSDPDREWDEVQLKYRPILDELEAEDA

SEQ ID NO: 94004 - protein, 446 aa, Halococcus sp.
  REGION 1..446: note = tr|A0A3A5JJR0|A0A3A5JJR0_9EURY Isochorismate synthase OS=Halococcus sp. IIIV-5B OX=2321230; GN = D3261_12165 PE=4 SV=1
MAQAGNEARPSGVDGGRLVSRTREVADRSFRAFLETASVPRVAWATPDGLELAGGGAAAVVSAEGDDRFDSLREDATRLFETVDATGPPAARPRVVGGIAFDADHAPTPPWEGFPAAEFFLPEVQLTRADGRTWLSVTEYGPDATPEAVEERLDERAGSVADLPMMSPSGGPPGVAATRRTTTKAEWTAGVERAVERIRTGDLRKVVLATALAADLETEIDLPAVLERFRRTYPECYRFLVQPTADAGFFGPPPERLVRMTGSRVETEALAGSAERGDTPEDDADLAAGLETDAKTVHEQALVAEAIADRLAPLGDVTVGERRVAAFANIQHLRTPITAELREETHVLDVVEALHPTPAVGGLPLERAREVIDETETFDRGWYAAPVGWFDAAGDGEFAVGLRSAVAGGRRATLFAGDGIVADSDPDAEWAELGPKFRPVLDELER

SEQ ID NO: 94005 - protein, 446 aa, unidentified
  source 1..446: note = Halodesulfurarchaeum formicicum
  REGION 1..446: note = tr|A0A1J1ACD5|A0A1J1ACD5_9EURY Isochorismate synthase OS=Halodesulfurarchaeum formicicum OX=1873524; GN = menF PE=4 SV=1
MAEDLHDRHQADRLDAAVRTTGPRTLREAIQALDPITAVWASPDGPAVLAVGQAKTVTASGAARFQEVKRRGDRLLERVETAHLPERARPRLFGGLSFFDQATLEPPWTDFEPAAFVLPAIQVTLGRDQTLVSGFGAGAAPPRLDQIVQQLAHAGEGTQTKTDPRISATATDLRADRPDWIERVRAIQDRIETGPLQKAVLAAALDVALTDPLPLGAVLKTLTDRYPSCYRFSFTPPGTQAGDTPPAQFFGATPEQLVGKRGRTVETEALAGTVERGATEAIDAANVSRLQRDSTLAVEHEFVASRIAEQLRETAATVTVGDREVRSLANVHHLRTPIHATLDTDTHVLDFVATLHPTPAVGGHPPEAALETIHEVESTVRGWYAAPVGWFDANGDGEFAVGIRSALARDSRVTLFAGNGIVAGSDPETEYEELAAKFRPIREVLE

SEQ ID NO: 94006 - protein, 441 aa, Haloferax mediterranei
  REGION 1..441: note = tr|I3R4T0|I3R4T0_HALMT Isochorismate synthase; OS = Haloferax mediterranei (strain ATCC 33500 / DSM 1411 / JCM 8866 / NBRC 14739 / NCIMB 2177 / R-4) OX=523841; GN = menF P E=4 SV=2
MEPLRTDEVTTHLVSRSVRLSAPPVTASLAAVHRPRTVWTAPDEPAVVGGGAAVTVEADGPARLTQVRETAASLFDGADIDGPSVARPRFFGGLAFHEGATGRDPWSDFPAARFVVPEVQLVFDGDEAWLTVTAAGDDPEMVEQRLVEVRETLTDLPDAPPQGPPGVSKRHRMTSVDAWRDSVEVAISRILAGDLRKVVLAQALEVELDRPASVPDLLARLGDTYPECHRFLVEPGVGASFFGATPERLVSLRGREVETGALAGTTGRGDTDDEDEWLADELLSSEKDSHEHELVAETIREQLDPLSAEIRVGDRGIRKLATVQHLWTPIDATLERDEHVLSLVDALHPTPAVGGLPPAAALDVIRETEPFDRGWYAAPVGWFDADGDGSFAVAIRSAIVDDTLATLFAGVGLVADSDPDAEWDEVQLKYRPILDELERDD

SEQ ID NO: 94007 - protein, 443 aa, Haloferax sp.
  REGION 1..443: note = tr|A0A498EUB5|A0A498EUB5_9EURY Isochorismate synthase OS=Haloferax sp. Atlit-109R OX=2282134; GN = DVK03_07285 PE=4 SV=1
MEPLRTDEVGTHLVSRSVRLSAPPVSASLAAMQRPRALWTAPDEPTVVGGGVAVAVEADGPERLARVRRAATALFDGADVDGPGIARPRFFGGLAFHEEATGRDPWADFPAARFVVPEAQVAFDGDDAWLTVTAVDAEADAETVDDRLDDLRETLESLDDAPLEGPPGVSDRHRTTSVEAWHESVDAAVSRIRAGDLRKVVLAQALEVELDRPAAAPDLLARLGGTYPDCHRFLVEPNGGASFLGATPERLVSLRGREVETGALAGTTGRGDTDDEDEWLANELLGSEKDNHEHELVAETIREQLAPLSAEIRVGDRGVRKLATVQHLWTPIDATLERDEHVLSLVDALHPTPAVGGLPPEAALGVIRDTEPFDRGWYAAPVGWFDADGDGSFAVALRSAIVEETLATLFAGVGLVADSDPDAEWDEVQLKYRPILDELERDD

SEQ ID NO: 94008 - protein, 392 aa, Haloferax volcanii
  REGION 1..392: note = tr|A0A558G8I3|A0A558G8I3_HALVO Isochorismate synthase (Fragment) OS=Haloferax volcanii OX=2246; GN = FQA18_13890 PE=4 SV=1
VAVAVEADGPERLARVRRAATALFDGADVDGPGIARPRFFGGLAFHEEATGRDPWADFPAARFVVPEAQVAFDGDDAWLTVTAVDAEADAETVDDRLDDLRETLESLDDAPLEGPPGVSDRHRTTSVEAWHESVDAAVSRIRAGDLRKVVLAQALEVELDRPAAAPDLLARLGGTYPDCHRFLVEPNGGASFLGATPERLVSLRGREVETGALAGTTGRGDTDDEDEWLANELLGSEKDNHEHELVAETIREQLAPLSADIRVGDRGIRKLATVQHLWTPIDATLERDEHVLSLVDALHPTPAVGGLPPEAALDVIRDTEPFDRGWYAAPVGWFDADGDGSFAVALRSAIVEETLATLFAGVGLVADSDPDAEWDEVQLKYRPILDELERDD

SEQ ID NO: 94009 - protein, 448 aa, Halogeometricum borinquense
  REGION 1..448: note = tr|A0A482TNZ3|A0A482TNZ3_9EURY Isochorismate synthase OS=Halogeometricum borinquense OX=60847; GN = ELS19_06585 PE=4 SV=1
MASLRTGEMEMHLVSRSVPVSAPSFRAVLRAADAPRTVWSAPDEATVVGSGAAATVTADGPDRFDRIREAAEELFSSGDVHAGTEAARPRLFGGFAFHADSTDGSPWEDFPGARFVFPRVQVTYAENGTWLTVNAVGPDANAEAVEERLARERERIESLPDPGPVSDPPGVVHRRRTTAKDDWNAGVNAAVERISAGDLRKVVLAQALAADLASDLSVPDILDRLGDSYPDCYRFLVEPEPDADRPQASFFGATPERLVSLRGRTVETGALAGTTGRGETPAEDEWLARELLDDEKNVHEHELVAETIRDQLAPFASSVNTGDRCVKRLATVQHLWTPITATLATSEHVLSLVEALHPTPAVGGLPPEKALETIRDTEPFDRGWYAAPVGWIDAAGYGSFAVALRSAVSRDDTTTLFAGVGVVEDSDPDREWDEVQLKYRALLDELER

SEQ ID NO: 94010 - protein, 453 aa, Halomarina oriensis
  REGION 1..453: note = tr|A0A3P3RC43|A0A3P3RC43_9EURY Isochorismate synthase OS=Halomarina oriensis OX=671145 GN=EIK79_10120; PE = 4 SV=1
MSRLRGGESVASFEGSLVSRSIPIDPPSFQAVLQAAPAPRTVWAAPDDTDTESTENDRDPTVIGSGAAVVLRADGPARFERIRSQADALVTDADTDTAWPARPRLFGGFAFHDDHDPTPPWTGFSGAQFVLPRIQITWKDDTAWLTTNAIGDSPALETRIERAHRWVESLSATGPTADPPGIHHRERLTDRATWRTAVTRSIDRIRAGELRKVVLAQALRATVDGKLSTADTLCRLRESYPDCFGFLVDATEGRHFLGATPERLVSLRGQSIHTGALAGTIGRGNTPEEDERLARELQESEKNAHEHDLVVNAIREQLAPFTRQITTDDRRVRRFATVQHLETPMSAKLAREEHVLSLVEALHPTPAVGGLPPDRALTTIRTTEPFDRGWYAAPVGWFDTEGNGSFAVALRSAVATQDVATLFAGVGIVSDSDPDDEWDEVQLKYRPVLDALQ

SEQ ID NO: 94011 - protein, 452 aa, Halomicrobium mukohataei
  REGION 1..452: note = tr|A0A4D6KCR2|A0A4D6KCR2_9EURY Isochorismate synthase OS=Halomicrobium mukohataei OX=57705; GN = E5139_03530 PE=4 SV=1
MSRQDAAETEPASVGAETYVSASRRIDVSPLAAAGAVPDRRRFCWLHPEEPDLLAVGATAAVTVDSPDRFETADDRLTELFGAVDGPDAPEIAAPRAVGGFAFFDGNTVPADTQSHWRDFDDGTFVLPRAQIVAGDDATWLTVTVPEDEHSELSSQLDGWADRLTDAGTHDGTEPEATAFHWSLSREEWERTVDDVIGRIESDGLDKVVLAQELTVDLDAPVPVAPVLSRLRETYPNCTTFCFSPTPGRTFFGATPETLVALADGHVQTEALAGTTDRGETAAEDTDLADAMLGDEKYQVENRIVADTIADALRPVADDVTVAEPSIKRITNLQHLHRPITATVPSETSVLSLAERLHPTPAVGGSPRRAASDVIRDVEPFDRGWYASPVGWVDGDGDGTFVVGIRAGLTWDERLALYGGAGIVTGSDPTTEYGEVRSRFEPILDALEVELP

SEQ ID NO: 94012 - protein, 474 aa, unidentified
  source 1..474: note = Halomicronema excentricum
  REGION 1..474: note = tr|A0A4Q7E976|A0A4Q7E976_9CYAN Isochorismate synthase OS=Halomicronema excentricum str. Lakshadweep; OX = 2294035 GN=DYY88_09300 PE=4 SV=1
MTVAPSRSNPLPHYPQIHQALQASLQQAQQANAERLVSLSFPLPMVDPLAVLLTYPQPHHRQCYFESPSRGQAIAAWDALICEHFSGRDRFATARQAIAQWQPRIQAIPQRPEGPYFFCSFSFFDTVATAIGGFAPATVLLTRWQVVRQKQRCVLIANVLIRPHSRLAPLARAIAEQVSQLQRFAPSARLLESHWGRDAVSWQPQLARPEGQQFQQKVTSTLAAIHRHDLQKQVVAQAFDVTRTHPFRRDIALPRLRSRYPDCYIFSFSGEGDSHFIGASPERLLSIRQGRLVTDALAGSAPRGTTPERDRDIGQQLLKNPKEQQEHQLVLDFIVNHLEAEGLHPCYSTPPGLLRLSNIQHLHTPICAEVSPQTSPLRLVECLHPTPAVAGVPMAAACDRIQQEETCDRGLYAAPLGWIDPAGNSEFIVGIRSALIQKNQARLFAGAGIVADSDPAQELAEIQLKLQALAEALG

SEQ ID NO: 94013 - protein, 470 aa, unidentified
  source 1..470: note = Halomicronema hongdechloris
  REGION 1..470: note = tr|A0A1Z3HP69|A0A1Z3HP69_9CYAN Salicylate biosynthesis isochorismate synthase OS=Halomicronema hongdechloris C2206 OX=1641165 GN=pchA PE=4 SV=1
MPVVPYRTVIQQHRSAIHAALTQGYQQAICTNRPHVVSLSLPIPSIDPLRLLHQSSPYERHLYLENTSQHQATVALGSLIEASAIGPSRFDRVHNFIETWCHQISCYDELAEYSPGIQFFCSFAFFDTPTHSDSPFPAASVFLPRWQITQCRQTSTLIANLLLTPLSDLEALLPDILQQLRRIESLAESPLSAYPPAPSLIQPALATQVFTQAVHRALQRICHNRLRKIVLAHALDVLASQPFNRAQLLERLRQQHPDCYVFSVGNGHGVSFIGASPERLLSIRQRRLITDALAGSSPRGDTAETDALLARQLLTSVKEQDEHQFVVDFLVRRLTELGLRPSYRTRPGLLQLSNIQHLHTPIRATVPLHTHPLHLVKALHPTPAVAGVPTDQACQQIRRFEQFDRALYAAPIGWIDHQGNSEFIVGIRSALIQANRARLYAGAGIVAGSDPERELDEIRLKLRALMEALV

SEQ ID NO: 94014 - protein, 440 aa, Halomonas alkaliantarctica
  REGION 1..440: note = tr|A0A4R7YPM8|A0A4R7YPM8_9GAMM Isochorismate synthase MenF OS=Halomonas alkaliantarctica OX=232346; GN = menF PE=3 SV=1
MHSNPIEALRHQLATLCHAAQKGVIRLSTPCQVNDMMGWLNMQSVYPRLYWQSRDVGAVEYATLGAVNAFESLAALKTDLFALNDIGGQQPDFFGGMAFDPDTPGWAHFPACYFLLPRIELKRHQGGATLSLNLRFDDRCPSAEIAQAHACLDALAAEQPLPRLQPLVYQREDRPSQQEWAAWVGLVTNLDHLVRTPKVVLSRETRLTTPQPPNPWALLLRWQSGAADCFHFGVQLIPSEAFIGCPPEQLYKREGRHLTTEALAGTTRRGRDAEQDQTFAAELLADKKNTLENQCVYQQLLTQLEPLSSQVQMGEAHIVKLRSVQHIRRLIHAELHRDVTDQQLLAVLPPTPAVGGVPRESALAFIRQHECHRRGWYAGVFGRISHASSDLAVAIRCAHIGPEAIRLYAGAGIVAGSQPDEEWHELDTKIADIMSLLGMG

SEQ ID NO: 94015 - protein, 441 aa, Halomonas boliviensis
  REGION 1..441: note = tr|A0A265E1X2|A0A265E1X2_9GAMM Isochorismate synthase MenF OS=Halomonas boliviensis LC1 OX=1072583; GN = menF PE=3 SV=1
MQSTHPIEALKHQLDTLCETASKGFIRLSTPCQVESLMGWLNVQSVYPRLYWRARDAGAIEYAALGVVKAFDSLGGLQADLAALADIGGEQPDYFGGMAFDPVTPGWQHFPGCHFLLPRIELRRHQTGATLSLNLRFDDRCPEAEIAQARACLAALEEEQPLPCLLPHVYQREDRPSQKEWAASVAQVTNPDHLGHTPKVVLSRETCLTTRETPNPWALLARWQVGATDCFHFGIQLTPHEAFIGCPPERLYKREGRHLMTEALAGTTHRVRDAQQDQALADELLADKKNSLENQCVYQQLLTQLEPHSSQVNMGEAHIVKLRSVQHIRRLIHAELHSDVTDQQLLSVLPPTPAVGGVPRESALAFIRQHERHRRGWYAGVFGSISHANSDLSVAIRCAHVGPEAIRLYAGAGIVAGSQPDEEWRELDTKIADIMSLLGMG

SEQ ID NO: 94016 - protein, 440 aa, Halomonas campaniensis
  REGION 1..440: note = tr|A0A2D0AXV1|A0A2D0AXV1_9GAMM Isochorismate synthase MenF OS=Halomonas campaniensis OX=213554 GN=menF; PE = 3 SV=1
MHSNPIEALRHQLATLCHAAQKGVIRLSTPCQVNDMMGWLNMQSVYPRLYWQSRDVGAVEYATLGAVNAFESLAALKADLVALNDIGGQQPDFFGGMAFDPHTPGWAHFPACYFLLPRIELKRHQGGATLSLNLRFDDRCPSAEIAQAHACLDALAAEQPLPRLQPLVYQREDRPSQQEWAAWVGLVTNLDHLMRTPKVVLSRETRLTTPQPPNPWALLSRWQSGAADCFHFGVQLTPSEAFIGCPPEQLYKREGRHLTTEALAGTTHRGRDATQDQALAAELLGDKKNTLENQCVYQQLLTQLEPLSSQVQMGEAHIVKLRSVQHIRRLIHAELHHSVTDHSLLSSLPPTPAVGGVPRESAMTFIRQHERHQRGWYSGVFGRISHTSSDLAVTIRCAHIDSEMIRLYAGAGIVAGSQPDEEWRELDSKIADIMSLLGMG

SEQ ID NO: 94017 - protein, 398 aa, Halomonas elongata
  REGION 1..398: note = tr|E1V3P0|E1V3P0_HALED Isochorismate synthase; OS = Halomonas elongata (strain ATCC 33173 / DSM 2581 / NBRC 15536 / NCIMB 2198 / 1H9) OX=768066 GN=entC PE=4 SV=1
MPRTHDDATRLQFVSPERGLHASGVMARITAPAWEGWQPDGDFQHAIRSTMELAQQAGQQAPIVMGAIPFDTRQPSCLYVPRHYEWREPTPLPADTGDNASASLAEASDIPQEAAFKQAVRQAIANFQHSDIRKAVLSRILELRLSNAVNIDQLLMRLRRQNPGGYQFRVPMADGATLVGVSPELLLRKEGTAIRSNPLAGSAKRQADDEQDRAMAERLLASAKDHHEHRLVIEEIRQVLGPCCTSLDIPESPSLIGTSALWHLSSNLEGRIADPATTALQLACRLHPTPAVCGYPTESARKLIDLVEPFDRGLFTGMVGWCDAEGNGEWAVTIRCGSIKHDTIRLFAGAGIVEASQPDAEWAEIQAKLGTMLNAFGLDASQLATHSWCDRPADEVVS

SEQ ID NO: 94018 - protein, 432 aa, unidentified
  source 1..432: note = Halomonas endophytica
  REGION 1..432: note = tr|A0A2N7U3X6|A0A2N7U3X6_9GAMM Isochorismate synthase MenF OS=Halomonas endophytica OX=2033802 GN=menF; PE = 3 SV=1
MPPSAITRRLSAMRTQTPSGFVRLGWPVMVERPLEWLRAQSVLPRFYWRSRGKDACEHAGIGCAHLVTATHEWEPAASPDGVETPRYFGGLAFDAEALGWPGFGACRFVLPRLELEHRAGRAVLYLNLYFDGRDRDAELDAAEAALNALRPALSPAPLTPTGFTRHDRPSAREWAEWITQATLLSDQARTPKVVLSRESRLATAQPVDPWILLNQWRQLAGDCFHFGFQFAPEAAFIGCSPERLYRREGTRLLSEALAGTSRRDGDPARDAALAAELLADPKNRRENQLVHADILARLAPLSHHASLAEPGIVKLRALQHIRRDIEAELHPWVRDRHLLAALHPTPAVGGTPRDAALKFIRRHESHRRGWYAGACGMLSHETTELTVAIRCARVTAGAVTLYAGAGIVIGSVPAAEWDELEAKIADVMSLLG

SEQ ID NO: 94019 - protein, 451 aa, Halomonas hydrothermalis
  REGION 1..451: note = tr|A0A291JTH9|A0A291JTH9_9GAMM Isochorismate synthase MenF OS=Halomonas hydrothermalis OX=115561; GN = menF PE=3 SV=1
MQVIQAAKALAAQLSALDLLACRGTQSLSVPCEVEDLVGWLNAQRVTPRLYWQPREASAAGYAVLGEARAFDSLVALQVDMQRQAQAQAQAQAQAQPASGSPDYFGGVAFDAQAAGWPGFGDCRFVLPRVLLKRQQGRCTLSVNLRFDDRPPAEELAAAQACLAAIVPEKPLPPVAHGSYQRCDTPTRPEWARWVSQVTQPERLQQLPKVVLSRETCLTAERVPSPWALLGRWQAEARHCFHFGVQWAPGTALIGCSPERLYRRQGQQLVTEALAGTARRGRDTAQDEALAGALLADKKNGLENQCVYQQLLTQLEPLAQRLEMDEAHVVPLRSVQHIRREIHAELHPFITDQQLLSVLPPTPAVGGTPRSAALARIRELERHARGWYAGAFGRVGHGSSELAVSIRCAQVSDTAIRLYAGAGIVAGSQADDEWHELDAKIADILSLLGMG

SEQ ID NO: 94020 - protein, 441 aa, unidentified
  source 1..441: note = Halomonas nigrificans
  REGION 1..441: note = tr|A0A2A4HPG8|A0A2A4HPG8_9GAMM Isochorismate synthase MenF OS=Halomonas nigrificans OX=2042704 GN=menF; PE = 3 SV=1
MMQFNPIEALKHQLDTLCDTAKTGFVRLNTPCQVDGLMGWLNRQSVYPRLYWHSRDADAIEYATLGAVNVFDSLAALEADLAVLAEIGGQQPNYFGGMAFDPGTPGWEHFPACHFVLPRIELQRHQGGATLSLNLRFDGRCPTAEIAQARACLDALVEEQPLPCLQPHVYQREDRPRQQEWAAWVGKVTNPDHLMHTPKVVLSRETCLTTSQTPNPWALLSRWQAGAADCFQFGVQFEPHEAFIGCPPERLYKREGQHLITEALAGTTRRGRDTPQDQMLAAELLADKKNTLENQCVYQQLLTQIEPLAHQVHMGEAHIVKLRSVQHIRRLIHAELHSNVTDQQLLSALPPTPAVGGVSRESALAFIRQHECHQRGWYSGVFGRISHASSDLAVTIRCAHIGQKAIRLYAGAGIVAGSQPDEEWRELDTKIADIMSLLGMG

SEQ ID NO: 94021 - protein, 408 aa, Halomonas sp.
  REGION 1..408: note = tr|A0A4Y8W3U9|A0A4Y8W3U9_9GAMM Isochorismate synthase OS=Halomonas sp. TBZ202 OX=2599398 GN=EQG41_07420; PE = 4 SV=1
MGSSKARDSLETETVEAPARDDRQLLFTSTHRELTATAPVKALTLPPCAGDRPDSPFQLAIRQALEGARRGGQANPIVVGAIPFDEHEPSCLYVPHRYEWRARDVPRRRADTAKALPLLLEQRSLPDERGFKKAVEQAIVNFGFGDVRKAVLSVMRELHFSAPLDVDRLLEGLSAHNPDGYRFRIPLADGADLIGISPELLLGKEAERVVSNPLAGTARRLPSAALDREAAERLLQSPKDHYEHRLVVDDVLQALEPHCAELTSPERPSLLSTTALWHLSTRIEGRLHDPDVTALQLACRLHPTPAVCGYPTQDARRLISLIEPFERGLFTGMVGWCDMAGNGEWVVTIRCGTVKRDVVRLFAGAGIVEASQPDAEWAEVQAKLGTMLQVCGVPAEERTLRVDTGVPS

SEQ ID NO: 94022 - protein, 441 aa, Halomonas sulfidaeris
  REGION 1..441: note = tr|A0A365TP06|A0A365TP06_9GAMM Isochorismate synthase MenF OS=Halomonas sulfidaeris OX=115553 GN=menF; PE = 3 SV=1
MLLIKPIDALKHQLDTLSDSARRGFVHLSIPYHVGNVMGWLNAQSVYPRLYWQSRDEGAVEYAALGVVKAFDSLAALQADFTALADSGGEQPDYFGGMAFDPDAPGWQHFPGCYFLLPRIVLRRHQGGATLSLNLRFDDRCPEAEIAQARACLAALEEEQPLPCLLPHVYQREDRPTLREWTASVAQVTHPDQLGHTPKVVLSRETCLTTPETPSPWSLLARWQTGAADCFHFGVQLTSHEAFIGCPPERLYKREGRHLMTEALAGTTRRGQDAQQDQTLADKLLADKKNNLENQCVYQQLLTQLEPLSSQVQMGEAHIVKLRSVQHIRRLIHAELHIGITDQQLLAVLPPTPAVGGVPRDSSLAFIRQHERHRRGWYAGVFGRISHASSDLAVTIRCAHISPEAIRLYAGAGIVAGSQPEEEWRELDTKIADIMSLLGMG

SEQ ID NO: 94023 - protein, 441 aa, Halomonas titanicae
  REGION 1..441: note = tr|L9UCQ2|L9UCQ2_9GAMM Isochorismate synthase MenF; OS = Halomonas titanicae BH1 OX=1204738 GN=menF PE=3 SV=1
MHSTHPIEALKHQLDALRHTDKKGFMRLNTPCQVGNLMGWLNVQSVYPLLYWQSRDAGAVEYAALGIVKAFGSLAALQADLAVLADSGGEQPDYFGGMAFDPGTSGWQHFPDCHFLLPRIELRRHQAGATLSLNLRFDDRCPEAEIAQARACLAALEEEQPLPCLLPNVYQREDHPTQKEWTASVEQVTHPDHLSHTPKVVLSRETCLTTPETPSPWALLARWQAGAADCFHFGVQFTPHEAFIGCPPERLYKRKGRHLMTEALAGTTRRGQDTQQDQALADELLADKKNSLENQCVYQQLLTQFEPLSSHVQMGEAHIVKLRSVQHIRRLIHAELHRDVTDQQLLAVLPPTPAVGGVPRKSALAFIRQHERHRRGWYAGVFGRISHTSSDLAVAIRCAHIGPETIRLYAGAGIVAGSQPDEEWHELDTKIADIMSLLGMG

SEQ ID NO: 94024 - protein, 460 aa, unidentified
  source 1..460: note = Halonotius roseus
  REGION 1..460: note = tr|A0A544QL18|A0A544QL18_9EURY Isochorismate synthase OS=Halonotius roseus OX=2511997 GN=EWF95_13100; PE = 4 SV=1
MESPHTADRPRLVSRSVPLADPVPSFRTLLDAMEPPRTVWNAADEACVVAGGAAATLTADGADRFDGIRTAAERLFETGDVHAGTEAACPRLFGGFAFHADGADADDGDTPGDSDDDHTSPWAGFPDARFVFPRVQVTRTDSGPWLTVNAVGPSATPAAVEAKLDEERERLLAHGEGAAAGPRPGITDRRRTTTPTGWRQAVRNAVERIDAGTLQKVVLAQALEVDLGDDLAVADILDRLSDKYPDCTRFLVEPDSDPPAAFFGATPERLVSLRGRTVETGALAGTTGRGETPAEDEWLAEELLTDDKNVHEHELVAETIREQLAPFAASVSVGERAIKRLATVQHLHTPITAELADDTHVLDVVEALHPTPAVGGLPPDRALETIRETEPFDRGWYAAPVGWIDAAGNGTFAVGLRSAVATRRQATLFAGVGIVGDSDPDAEWDEVELKFRPILDELEA

SEQ ID NO: 94025 - protein, 448 aa, unidentified
  source 1..448: note = Halopelagius longus
  REGION 1..448: note = tr|A0A1H1AU13|A0A1H1AU13_9EURY Isochorismate synthase OS=Halopelagius longus OX=1236180 GN=DWB78_01505; PE = 4 SV=1
MESLGSDEAGARPVSRSVRISKPQFRAVLRAADAPRTVWSAPDEATVVGSGAAATVTADGPNRFERIREAAEALFSSGDVHAGTEAARPRLFGGFAFHADSVAGPPWEQFPGARFVLPRVQVTYADNGTWLTVTAVGPDADPRTVERELDRHRERLRSLPDPGPPADPPGVVGRRRTTAKGDWRSSVNAAVERIRAGDLEKVVLAQALDVDLGDDLSVPDVLWRLGEAYPDCYRFLVEPVGDDGPQASFFGATPERLVGLRGRTVETDALAGTTGRGETPAEDEWLANELLADEKNVHEHELVAETIRDQLAPFASSVNAGARRVKRLATVQHLWTPITAELATDEHVLSLVEALHPTPAVGGLPPDRALSTIRDTEPFDRGWYAAPVGWVDAAGYGSFAVALRSAVSREDSATLFAGVGVVEDSDPDREWDEVQLKYRPILDELERS

SEQ ID NO: 94026 - protein, 443 aa, unidentified
  source 1..443: note = halophilic archaeon
  REGION 1..443: note = tr|G2MJ01|G2MJ01_9EURY Isochorismate synthase; OS = halophilic archaeon DL31 OX=756883 GN=Halar_1501 PE=4; SV = 1
MESPRQAGAEPVETTLVTGTREVEDVSFRAFLASHAAPRFHWAAPDGLELVGAGEAARLMGHGTDRFEAVRDVAIECFEGADLVDGAARPRFFGGGAFHDDHEPSPPWEGFRAAEFVLPQIQLVRADEATHLTVSRGDGDKEALERDLVAALDTLSELPAMRPVGDPPGVVASRRTTTETEWTEQVESAIRRIEDGELRKVVLAVALAVTLETEVTVPDALERLRRSYPDCFRFLVQPTDQAGFFGVPPERLVRLEGPDARTEALAGSVARGDTPEADAELAQSLLDSEKIQHEQGLVTEAIEERLAPFGTVHVGDQGVRKLANIQHLQNPISLDLEVEAHVLDLVEALHPTPAVGGLPPAAAERTIRETETFERGWYASPVGWFDADGDGEFAVGIRSAVAGGRRATLFAGNGIVADSDPAAEWEEISLKYEPILAELARED

SEQ ID NO: 94027 - protein, 489 aa, Halopiger xanaduensis
  REGION 1..489: note = tr|F8D820|F8D820_HALXS Isochorismate synthase; OS = Halopiger xanaduensis (strain DSM 18323 / JCM 14033 / SH-6) OX=797210 GN=Halxa_3300 PE=4 SV=1
MDRTSGKREVEGRLAGTDTAATRSVTVDGELVSRSRELEDVSFGAIAAADVDGVDADTAAEANQTDRARIQWAAPDGLELVGRGVAARFVATGPERFAAIRRQASRAFDGLEHDGPEVARPRAVGGFAFHDYHAADRTDSDDSDSTARSTPNPQPNWDDFDAASFVIPRVFVVRSDGEGTWLTAVGTDAGEATARLERWHDRIADLPAMQPSGAGPGVAATHRTTAPEEWRTGIEAALERIADGRLTKVVLAQALSVALEGPIDVGATLERLRREYPNCYRFRIGREGGVTFFGAPPERLVAKRGPRVATEALAGSAPRGETPDEDQQHADRLLESDKLRREHELVVDAIRDQLAPLARDLEIDGRTIRKLATIQHLRTPIEATLDGDRHVLEIVEALHPTPAVGGMPPDAAWETIRETEPFDRGWYAAPVGWFDADGDGEFAVGLRSGIATDEAVTLFAGSGIVADSDPDEEWEEVQLKFRPILDELR

SEQ ID NO: 94028 - protein, 446 aa, Haloplanus aerogenes
  REGION 1..446: note = tr|A0A3G8QW50|A0A3G8QW50_9EURY Isochorismate synthase OS=Haloplanus aerogenes OX=660522 GN=ATH50_0503; PE = 4 SV=1
MGISRSDETGSRLVSRSVRASVPSLRAALDAMPAPRTFWTAPDEATVVAGGAAATLTADGRDRFTAIKDGIDRVLRAGDVHAGTEAACPRLFGGFAFHDEGTEDETWADFPGARFVLPRVQVTDTDRGMWVTVNAVGPDATAEAVEARLESERERFESLDVPDPSPPPGIVSRTRTTPRDAWCDSVDAAVSRIRAGDLQKVVLAQALDVTLDRPLSVPDVLARLGDTYPDCYRFLVEPTDGDAPRPGFFGATPERLVTRHGRTVTTGALAGTTGRGDTPAEDDWLAEELLGDEKNVHEHELVAETIREQLDPFASTITAGQRRVRRLATVQHLFTPITATLDSDTHVLDLVEALHPTPAVGGLPPEKALATIRETEPFDRGWYAAPVGWIDAAGNGTFAVAIRSALSRGTKTTLFAGVGVVADSDPDREWDEVQLKYRPILDELER

SEQ ID NO: 94029 - protein, 448 aa, unidentified
  source 1..448: note = Haloplanus salinus
  REGION 1..448: note = tr|A0A368NCV9|A0A368NCV9_9EURY Isochorismate synthase OS=Haloplanus salinus OX=1126245 GN=DU504_14675; PE = 4 SV=1
MGIPRSDEAGPRLVSRSVRTSVPSLRAALDAMPAPRTFWTAPDEATVVAGGAAATLTAEGRNRFAAIKERIDRVLRSGDVHAGTEAACPRLFGGFAFHDEGTDDDTWDGFPGAQFVLPRVQVTDTDRGTWLTVNAAGPDASAEAVEERLGVARDRFEALDEPAPTPPPEIVSRTRTTRREAWRDSVEAAVSRIQAGDLRKVVLAQALDVTLDRPLSVPDVLARLGETYPDCYRFLVEPAADASAGRPAFFGATPERLVSRHGRTVTTDALAGTTGRGDTPAEDDWLAEELLADGKNLHEHELVADTIREQLAPFTSSISAGQCRVRRLATVQHLFTPITATLGGDTHVLDLVEALHPTPAVGGLPPERALATIRETEPFDRGWYAAPVGWIDAAGNGTFAVAIRSALARDAETTLFAGVGVVADSDPDREWDEVQLKYRPILDELERA

SEQ ID NO: 94030 - protein, 448 aa, Haloplanus sp.
  REGION 1..448: note = tr|A0A345E4W8|A0A345E4W8_9EURY Isochorismate synthase OS=Haloplanus sp. CBA1113 OX=1547899; GN = DU500_12865 PE=4 SV=1
MGIPRSDEAGPRLVSRSVRASVPSLRAALDAMPAPRTFWTAPDEATVVAGGAAATLSADGRDRFAAIKEGIGRVLRSGDVHAGTEAACPRLFGGFAFHDEGTDDDTWAGFPGARFVLPRVQVTDTDRGTWLTVNAAGPDAAPEAVEDRLDAERDRFEALDDPDPTPPPEIVSRTRTTPREAWCDSVDAAVSRIHAGDLRKVVLAQALEVTLDRPLSVPDVLARLGETYPDCYRFLVEPTADASADRPAFFGATPERLVSRHGRTVTTDALAGTTGRGDTPAEDDWLAEELLGDEKNLHEHELVAETIREQLAPFASSISAGQRRVRRLATVQHLFTPITATLDSDTHVLDLVEALHPTPAVGGLPPERALATIRETEPFDRGWYAAPVGWIDAAGNGTFAVAIRSALARGAETTLFAGVGVVADSDPDREWDEVQLKYRPILDELERA

SEQ ID NO: 94031 - protein, 447 aa, unidentified
  source 1..447: note = Haloprofundus sp.
  REGION 1..447: note = tr|A0A4D7H7Z0|A0A4D7H7Z0_9EURY Isochorismate synthase OS=Haloprofundus sp. MHR1 OX=2572921; GN = FCF25_13545 PE=4 SV=1
MNPAQRNQQTTASHAESTLVSRSCEIPDVSFRAFLADQTAPRVHWASPDGLELVGGGAAAHLSASGPERFDHLRDEAAAVFDDVDHEGPAATRPRMLGGLSFDAGHEETPPWTGFAAATFVLPRVQLTRGDDATWLTVVEYGPDATPETADSALDAARDSLSELPMMRPSGGSPGVVDRRWRTPRDEWVAQVEQVTERIRSGDLLKVVLATALDLELAERVDIPDVLERLRRTYPECYRFLVQPTDEAAFFGPPPERLVKRDGRTVETEALAGSMPRGETPEDDADFAASLLESEKLQHEQQLVADTVCEQLERFGDVTAHDKRIRKLSNIQHLWTPISATLDDDTHVLSLVEALHPTPAVGGLPLEAALETIRQTESFDRGWYASPVGWFDAEGDGEFAVGIRSGVAGGTRATLFAGNGIVGDSDPEAEWEELQPKVRPILDELER

SEQ ID NO: 94032 - protein, 567 aa, Haloquadratum walsbyi
  REGION 1..567: note = tr|Q18J12|Q18J12_HALWD Isochorismate synthase; OS = Haloquadratum walsbyi (strain DSM 16790 / HBSQ001); OX = 362976 GN=menF PE=4 SV=2
MESRQTRLDDVTLVSRSARIPSLSSSVRDIFDIATSPRVVWSAPDETTVLGSGAAATIVATGSDRFESVRDAAESLFSTGDVHAGSEVARPRLFGGFAFHAERADSKPWKQFPNAQFIFPRVQITWSTDTHTETDTADNDSHAWITVNAVDPGATPDAVEYRLSQEIERVKTLESTNNSRSPPGVTCRHRRTSRDAWNRGVTAAINRISADNLQKVVLAQALEVELEETPVLGDIITRLGEHYPSCYRFIIEPVPGTPVDQRIHTDVNAMTTVGSEDIHNTSQSPAFFGATPERLVSVRGRTVETGALAGTTGRGETTAEDEWLAAELARDEKNVHEHELVAETIREQLSPYATAITSDSRRVRKLATVQHLWTPITATLEEDKHALSLVEALHPTPAVGGLPPTTAAETIRETEPFDRGWYAAPVGWIDAAGYGTFVVALRSAVAHDDAATLFAGVGIVADSNPDSEWDEVQLKYRPILDELESNDADDDTINQAQSEISTHTQGTVDDTMNESASTSISTPDTTVPSESNSQSNTTMEPTSDADADADADVDADADTNTNIDDTE

SEQ ID NO: 94033 - protein, 324 aa, Halorhabdus tiamatea
  REGION 1..324: note = tr|U2E5I9|U2E5I9_9EURY Isochorismate synthase protein (Fragment) OS=Halorhabdus tiamatea SARL4B; OX = 1033806 GN=menF PE=4 SV=1
MESVRADTVGTAHDGDALAVRGCQLEDVAPAAVLDAAVRDRPWTAWAGPEETVAATGAAATITATDGDRFERVRRQAAALFADRDVQSSLPTFARPRLFGGFAFHDGDGGHHPEADWTGFPDANFHLPAVSVVERDGRTWLTTAAVGPDAESTAETALDRWREKLADASPPTTSPPGIRIRSEIPDRDAWIAQVEAAVDRIDRGDLLKVVLAGAQTVDLAGSLSAPAALGRLGETYPDCYRFGFAPGNTDAGTFFGATPERLLRRDGRRVQTAALAGSTGRGDTQAEDEWLAEELAESRKDTHEHALVVDAIREQLDDFAESVE

SEQ ID NO: 94034 - protein, 450 aa, Halorientalis sp.
  REGION 1..450: note = tr|A0A498L3F8|A0A498L3F8_9EURY Isochorismate synthase OS=Halorientalis sp. F13-25 OX=2479928; GN = EAF64_10855 PE=4 SV=1
MRGMEPAQREERVGPRAGAVLVSRTCEVPDVSYRAFLASHSAPRLHWAAPDGLEVVGSGAAVTLTAHGTDRFDRLREEATTIFRDVDRTGPAETRPRFLGGLAFNENHDPAPPWTGFPAAAFSLPETQLTRADGTTWLTVREYGQDVSPDDVAGRLERTREDLETLPSMCPSGGPPGVERTEVTPTKTEWTTQVESAIDRIADGDLRKVVLATALSVDLADEIDVPGVLERLRRTYPSCYRFLVQPTDEAAFFGPPPERLVKLSDGRVQTEALAGSVPRGETPEADAEHAKSLLESEKLQHEQRLVVDAIMDQLAPLGEVAEGEQGVRKLTNIQHLQTPITTTLSGDEHVLTIVEALHPTPAVGGLPPEKAWEVIRDTETFERGWYAAPVGWFDSDGDGEFAVGIRSGVAGGRRATLFAGNGIVTDSDPDEEWDEVKHKYRPILDELERE

SEQ ID NO: 94035 - protein, 456 aa, Halorubrum ezzemoulense
  REGION 1..456: note = tr|A0A481RFS9|A0A481RFS9_9EURY Isochorismate synthase OS=Halorubrum ezzemoulense OX=337243; GN = EO776_08750 PE=4 SV=1
MEQARSRSSSPLVSRTTEVVEPAFAAAFEALPTPRTTWSAPDDALVIGGGEAATLTASGGDRFAAIRESATELFESGDVHAGTEAARPRVFGGFAFHEGACDGEPWAPFPEARFVLPRVQLTYADNGAWLTVNAVGPDAGVDGVEDRLAREVDRFAALDAVDAGSPTAAAGSRPPRPGIRESRRTTSRDAWRESVGAAVDRIADGDLQKVVLAQALEADLAADFPRAATLERLAEKYPDCHRYWFEPAAGESAFFGATPERLVSLRGRTVETDALAGTTGRGETPSEDEWLARELLDDEKNVHEHELVAETVRDQLEPFAASVSAGERRVRRLATVQHLHTPITAELDADRHVLELVEALHPTPAVGGLPPDRALTTIRETEPFDRGWYAAPVGWIDAAGNGAFAVAIRSAVGTRRRATLFAGVGVVSDSDPDREWDEVQLKYRPILDELEGDAAD

SEQ ID NO: 94036 - protein, 456 aa, Halorubrum sp.
  REGION 1..456: note = tr|A0A4U7C2P7|A0A4U7C2P7_9EURY Isochorismate synthase OS=Halorubrum sp. CGM4_25_10-8A OX=2518116; GN = EXE52_12765 PE=4 SV=1
MEQARSRSSSPLVSRTTEVVEPAFAAAFEALPTPRTTWSAPDDALVIGGGEAATLTASGGDRFAAIRESATELFESGDVHAGTEAARPRVFGGFAFHEGACDGEPWAPFPEARFVLPRVQLTYADNGAWLTVNAVGPDAGVDAVEDRLAREVDRFAALDAVDAGSPTAAAGSRPPRPGIRESRRTTSRDAWRESVGAAVDRIADGDLQKVVLAQALEADLAADFPRAATLERLAEKYPDCHRYWFEPAAGESAFFGATPERLVSLRGRTVETDALAGTTGRGETPSEDEWLARELLDDEKNVHEHELVAETVRDQLEPFAASVSAGERRVRRLATVQHLHTPITAELDADRHVLELVEALHPTPAVGGLPPDRALATIRETEPFDRGWYAAPVGWIDAAGNGAFAVAIRSAVGTRRRATLFAGVGVVSDSDPDREWDEVQLKYRPILDELEGDAAD

SEQ ID NO: 94037 - protein, 441 aa, unidentified
  source 1..441: note = Halovibrio variabilis
  REGION 1..441: note = tr|A0A511UN22|A0A511UN22_9GAMM Isochorismate synthase MenF OS=Halovibrio variabilis OX=31910 GN=menF; PE = 3 SV=1
MQTKSPVEVLQHRLDSLPETGTNGFVRLSTPCQVENLLGWLNIQSMYPRLYWQSRDAGAVEYAALGVVNAFDSLAALEADLAALAAVGGEQPDFFGGMAFDPSTPGWEHFPACHFLLPRIELTCHQGGATLSLNLCFDDRCPKDEIAQAHACLDALVAEQPLPRLKPHVYQREDRPSQQEWAAWVWQVTNPDHLAHTPKVVLSRETCLTTPKTSNPWALLSRWQSGAADCFHFGVQFSPHEAFIGCPPERLYKREGRHLITEALAGTTRRGRDAQQDQVLATELLADKKNTLENQCVYQQILTQLEPLSSQVQMGEAHIMKLRSLQHIRRLIHAELHSDVSDQQLLSVLPPTPAVGGVPRESALAFTRQHERHQRGWYSGVFGRISHASSDLAVTIRCAHIDSETIRLYAGAGIVAGSQPDEEWRELDTKIADIMSLLGMG

SEQ ID NO: 94038 - protein, 573 aa, unidentified
  source 1..573: note = Handroanthus impetiginosus
  REGION 1..573: note = tr|A0A2G9GNA5|A0A2G9GNA5_9LAMI Isochorismate synthase OS=Handroanthus impetiginosus OX=429701; GN = CDL12_20654 PE=4 SV=1
MATCFTRLYCIAQFKGNESIKCSLSLSSTTGTAKTLVHFSNHKYQELSSLSINGCGGDPRTPIGTVETRTFPTAATPELAADRLNSAIYDLKMNPSSLDSGIIRIEVPIQQEIEALDWLRSQSNTHLPRCFFSGRDSSNIPLIEYGNGDASSSDQNDSQRKLVSVAGLGSAVFFRQLDPFSLDDWHSIKRFLSKNSPLIRAYGGMRFEPRSNIAPEWKGFGSFYFMVPQVEFDEFEGSSMIAATIAWDNRLSRPYREAIAALEATMLQISSVVRRLNGTGSRAAMLHQTHVPNRASWDSAIKKALDLMTRKDSSLVKVVLARSSRVLTTTEIDPLEWLTSLQVEGDKAYQFCLQPPESPAFIGNTPERLFYRDQLSVYSEALAATRRRGETESLDLQIGHDLLTSAKDHHEFAVVRECIRRKFEGACSSTIVEPNKALRKLPRIQHLYAKLKGTLQNEDDEFKILSLLHPTPAVCGLPTEEARMLISETEMFDRGMYAGPVGWFGGAESEFAVGIRSALVGKGLGAILYAGTGIVEGSKSHLEWQELELKTSQYTRLMKQETPFLAVREKVEL

SEQ ID NO: 94039 - protein, 398 aa, Herbiconiux sp.
  REGION 1..398: note = tr|A0A521MSV1|A0A521MSV1_9MICO Isochorismate synthase OS=Herbiconiux sp. OX=1871186 GN=EPO52_04810 PE=4; SV = 1
MLLPRVDPQHPLIWMRKGQGIAGVGEALRLEFSGANRMLDACAAWKEVAEASTVIDPLGVPGTGLVAFGSFAFADDSAAASVLIVPKLVLGKRDGKYWVTRIVADGASGADGGGDAALPAARPLGSEYRLSLLPGAMNADAFRASVDAAVARIADQQLSKVVLARDLVGHLPAGSDLRRPLTDLALGYPDCWTYAVDGFVGSSPETLVSVSHGHVSARVLAGTTSRGSDAEADHDKAVALATSAKDLDEHGFAVTSVVNALAPHSRNLITSEIPFTLKLPNLWHLASDVVGTLSDGSTSLDLIAALHPTAAVAGTPRAEALSLISELEPFDRGRYAGPVGWVGADGDGEWAVALRSAQVDASGDITAYAGCGIVADSDAEREYLETKMKFRPIVEAFG

SEQ ID NO: 94040 - protein, 402 aa, Herbidospora sp.
  REGION 1..402: note = tr|A0A4U3M6W5|A0A4U3M6W5_9ACTN Isochorismate synthase OS=Herbidospora sp. NEAU-GS14 OX=2575442; GN = FDA94_30475 PE=4 SV=1
MSVALGLHPPLVVRTVPVRDPGDLISLLPGPAAYTWVHHGDGLVAWGEALRVTIPPGPGRFAWARDWLAGAFGHADIDDRVRRPGSGPVAFGSFTFDPASAGSVLVVPRVVVARRDGQAWLTTVGEENLGLVTPAVPPGRIRYSDGALTAPGWEHAVAAAVERITSGGLEKVVLARDLIATAEADIDPRVPLARLAARYPECYTFSVGGLIGATPELLVRHTGRAIESLVLAGTIPSGADPATLFDSPKDRYEHTCAVASVEAALKPLCAELDVPAEPELLSLPNVQHLASRVTGKLDDGASVLDVVAALHPTAAVGGTPTDDAVALIPRLEQMDRGGYAGPVGWIDARGDGEWGIALRCAQLDGPRARLFAGCGIMGGSDPAAELAEAQSKFRAMQYALEG

SEQ ID NO: 94041 - protein, 395 aa, Herpetosiphon geysericola
  REGION 1..395: note = tr|A0A0P6YLU6|A0A0P6YLU6_9CHLR Isochorismate synthase OS=Herpetosiphon geysericola OX=70996; GN = SE18_04760 PE=4 SV=1
MSSFEQERLRESAWQLLDTYQAESAFFFASPNHTLLAQLSYVDLISQTALPELEQRVHEALQRAERSGEVNPVVVGALPFAPDAAAYLALPSRVAWAGPLHAEAQPYWHNQRLPHCTIEPMPAPEHYKRGVAQALAKMQAGDLQKVVLSRSLQLTADAPLDVNLILASLARNNKTGYTFAVPLPTRRALVGASPELLLARNGNQVIANPLAGSIPRSSDPEEDARRAAGLLVSAKDLHEHKVVVDAVAAALELFCSNLEVPAPTVISTATMWHLSTTLVGELKPDAPSSLGLALALHPTPAVCGTPTEAARAAIREIEPFDRGFFTGMVGWCNAQGDGEWIVTIRCAEVVDQSLRLFAGAGVVLGSTPEAELAETGAKFRTMLLAMGLDSEGEVA

SEQ ID NO: 94042 - protein, 435 aa, Histophilus somni
  REGION 1..435: note = tr|B0UT52|B0UT52_HISS2 Isochorismate synthase MenF; OS = Histophilus somni (strain 2336) OX=228400 GN=menF PE=3; SV = 1
MFNLIRYKMDNLHEIKAEFIRLINQYQFDPKNDFSVLHLDLDEELNLLGWLKAQHHYPQFYLNFRDTNKKILGLGEVCRFTQVKSAQTFVQQFNLSLIGGCQFNGEPLFILPRLSFIQEQKLVIQLIIDNKKPWEQEKYDLLNIIHSLEKQVQLNPIHQSIQLITTKANQTEWCLWVEKALHEIKQKNLTKVVLANETDFKTDSPLNAKDFLAESEKYNTGCYHFLFAQNNTQAFIGSTPERLYVRKENRLITEALAGTAFITNDEHINQQQAQWLLQDPKNIYENSLVVEGICQHLIPYVEEITVSELEIKQLRQIQHLKREISARLKAGNTDAVCLNAIHPTAAIAGLPQKEAKVFLQNTETFDRTWYAGALGIMTETESEFCVTIRSSFIEQDYIRIFAGAGIVEGSIPLLEWQEIERKALGLISLLQKETE

SEQ ID NO: 94043 - protein, 384 aa, unidentified
  source 1..384: note = Homoserinibacter sp.
  REGION 1..384: note = tr|A0A5C8IHF2|A0A5C8IHF2_9MICO Isochorismate synthase OS=Homoserinibacter sp. GY 40078 OX=2603275; GN = FVQ89_01110 PE=4 SV=1
MRRGEGVAGLGETLRLTFRGPDRIAQAAETWRRIAQAATVVDQVGISGTGLLAFGAFTFSAESEFESVLIVPQTIVGRRDGVSWVTQISIAGTPSAPREPEAIPLGAEFRISLQPGTVDRERYRKMVTDAVARIRTGPLRKVVLARDLVGHVPAGGDIRRVLVDLALGYPDTWTFAVDGHIGSSPETLVRVNHGQVSARVLAGSIARGADAESDHAAAVALATSTKDVDEHRYAVQSVLAALGPHARGADGRGVAASEYPFALKLPNLWHLATNIEGTLSDGSSALDLAAALHPTAAVAGTPTAAALETIRELEPLDRGRYGGPVGWVDANGDGKWAVSLRSAEVDAEGGIRAFAGAGILAPSDPDVEFDETALKFRPVAEAFG

SEQ ID NO: 94044 - protein, 506 aa, unidentified
  source 1..506: note = Hormoscilla sp.
  REGION 1..506: note = tr|A0A533NVK3|A0A533NVK3_9CYAN Isochorismate synthase OS=Hormoscilla sp. GUM202 OX=2480853; GN = EBE86_23410 PE=4 SV=1
MRVTSEHGNIFSEPKALENFLLGCQETAIAKDSTMIVSISQEIPLVDPLAVMAAIAPSDRLQFYWESAGEAIAAIDAATSIKITQADRFRKAQGFIHTCLANTISIGDLDRRFAGPHFFCSFTFFGQQSESVFPAATVLLPRLQVACSANHCILVTNLAIGPLADIKSICSKLWWDWHKISLCNNNGFHKAAGNKLPTGQLSVPPLRLAILGDTEDKFKQTVGEALELIRSERLSKIVIAHGISIQAKVPFREREALHNLRQLHGDCHIFMVSNGEGKSFIGATPERLMRIRCVPDSGIGALCPPSSDPSAPEGHSFGTENQQLFTEALAGSAPRGKTRREDADFANSLLASEKERREHQFVIDYIKGCLSKLGLKPEILPMPKLRKLANIQHLWTPIEAKVPPGVHPLSILAALHPTPAVAGTPREIACQEIPRYESFERGLYAAPLGWVDGRGNSEFVVGIRSALIEGDRATVYAGAGIVAGSDPKKELAEIQLKFQALLQALV

SEQ ID NO: 94045 - protein, 373 aa, Humibacter sp.
  REGION 1..373: note = tr|A0A345K2W6|A0A345K2W6_9MICO Isochorismate synthase OS=Humibacter sp. BT305 OX=2282656 GN=DVJ78_06450; PE = 4 SV=1
MAGIGEAVRLTFSGPDRMSEACEAWRAIVSAATVSDPVQAPGSGLIAFGTFAFDDSSTAESVLIVPRTIVGRRGDVSWVTRIRVEGDATPAPEPELRRLGEEYRLTLLPGEVSPDDYRAMVEAAVGRITAGELSKVVLARDLRGHLPAGSDLRRVLYDLALGYPDCWTYAIDGFLGSSPETLVRVDHGTVSARVLAGTTARGADAVSDQERAVALATSAKDLDEHGFAVRSVLTALEPHSRGLATSEVPFTLKLPNLWHLASDVIGTLSDGSTSLDLIAALHPTAAVAGTPTADALALIRELEPFDRGRYAGPVGWVGADGDGEWAVALRSAQVDAAGDITAYAGCGIVAESVPEREYLETKMKFRPIVEAFA

SEQ ID NO: 94046 - protein, 399 aa, unidentified
  source 1..399: note = Hydromonas sp.
  REGION 1..399: note = tr|A0A345DB59|A0A345DB59_9BURK Isochorismate synthase DhbC OS=Hydromonas sp. F02 OX=2268024 GN=dhbC; PE = 4 SV=1
MNDVTQVGRACEKFMVEQNDLSGKTLFVSPHKSIIGKGVAAQLKVSSSAVNAAFVTEMLSQVEQGGGRRMLFAALPFDSNAKAYIQVPEQVMVLASPAADFAFDLVLPVKVDSVVSIPSEECYKSMVGHALDAIDAKSLNKVVLSRSLQISAQINVSNLIKQLLSSHAQGYKFAFHHEDSEGAMATLVGASPELLLSKNGVSVTSNPLAGSIPRCVDPEEDRRRAQNLLRSTKDLYEHELVVRSVAAALAPFCTQLSVPSRPSLLSTPTMWHLSTVVEGTLHDASTSSLSLAQALHPTPAVCGYPAEAARTFIQQHEGFDRNLFTGLVGWEDEFGDGEWAVTIRCSQVTDDKVTVYAGAGVVSGSEPERELRETQAKMRTMLNAMGLNEILEYSEEAYV

SEQ ID NO: 94047 - protein, 376 aa, unidentified
  source 1..376: note = Unknown
  REGION 1..376: note = tr|A0A3B0TNH7|A0A3B0TNH7_9ZZZZ Isochorismate synthase @   Menaquinone-specific isochorismate synthase; OS = hydroth  ermal vent metagenome OX=652676; GN = MNBD_BACTEROID01-231 8 PE=4 SV=1
MQKTAKSTKSVYEAISVCIKNNLTFAAYQLPQSKKPILIIQSTPGINKINDLSELRKIKGFLVSPFQKAECNPMFLIRPDYVYEGELKQAEFERLESTTRVYTNGNVCKRPKELSKTEYLLQIDKTINAIQENKFEKAVLSRVKFIQGDYSGKESEIFRLLCDSYPNAFVYIFRAGSQLWLGATPEPLACIDNGNFYTSSVAGTRSFNKGSLNITQWGNKERQEQHYVTDFIRGVLKSFQLNNYKQTGTYAKKAGNLLHLRTDFSFETAKIKGEVGRLVESLHPTSAVCGMPKKDTLKFITGIEKHYREYYSGYLGPVGMDGAISLFVNLRCMKVFKDALALYVGGGITTDSVPEEEWEETEIKAETLLSVIQKIY

SEQ ID NO: 94048 - protein, 482 aa, unidentified
  source 1..482: note = Hyella patelloides
  REGION 1..482: note = tr|A0A563VNM7|A0A563VNM7_9CYAN Isochorismate synthase family protein OS=Hyella patelloides LEGE 07179; OX = 945734 GN=H1P_1780005 PE=4 SV=1
MTQSKISMPVISQENEFILDRLELDNFWHHRSFSFSVDESTKILSFVQKIPVVDPLAVLQQFAPTNTLRFYWENPSKQEAIAAWGITRNLTIESNARFAKTQSFIKSCFKQIISEGDTNINGSEARIFCSFSFFSQSELANKSHPAATIFLPRFQIAKKNKNHFFIVNFPLVNQQNLKQIKTQFSQKIQSIDWSRYEQLSTREREEVSWEERNLFSAQNSQYFKSTVRSALDSIAIDELSKIVIAHAVDIKSEKHFNVTDSLSNLRERHPDCYIFAIGNDRGQDFIGASPERLVSIQNKQLVTDALAGSAPRGKSTSEDVQWANILLKNRKEKREHQAVSDFILERLQDMGLKPHQLPLQLLQLSNIQHLWTPIYAHLPKGIDPLDIVAQLHPTPAVAGVPNKIVFDKIRHYEKFDRALYAAPLGWIDRRENCEFVVGIRSALIEKNRARLYAGAGIVSGSNPDKEFVEIQLKLQSLLKALV

SEQ ID NO: 94049 - protein, 480 aa, unidentified
  source 1..480: note = Ignavibacteria bacterium
  REGION 1..480: note = tr|A0A3M0WSR4|A0A3M0WSR4_9BACT Isochorismate synthase OS=Ignavibacteria bacterium OX=2053306; GN = D6830_04425 PE=4 SV=1
MIFKGLIKINAVNLEKTTENIDNGKITSEESLPITKKKIFRSVKKIEKVKFLNIVHNLTSTDEQYLYWNEPAFGFSFIAIGKCISIKSNGPDRIEETEKLISFLKDSIVSNEDEFNLTSLPLFLGGLKFAPNGNSELWKDFNDSEWFIPKTILLKYDKDYYQVTSVYSDDESELSTAEISFEQLNSLAANGYPEFKSAKIVDSNIDDNYEFEFWKDMINSALESIDNKQIHKVVLSREVQLLLDREPDIDILLKQLADRYPYCYIFAFRKNGSIFFGASPERLAKFSGGTVEADALAGSFPRGRTLEEDIQLEKELLSNEKNLNEQKAVVDFIKSSFSKFSVDITYPEEPIIRKLPNIQHLWTPIKAKINSDKPILSFLKEVHPTPAICGAPWSTAMSTILNKEKHSRGLFTGAIGWFNLKNEGEFAVAIRSALLKGKNVYAFAGCGIVQGSDPNTEFEETKLKLRPILNLFDYEEKDKS

SEQ ID NO: 94050 - protein, 455 aa, unidentified
  source 1..455: note = Ignavibacteriales bacterium
  REGION 1..455: note = tr|A0A419H7U8|A0A419H7U8_9BACT Isochorismate synthase OS=Ignavibacteriales bacterium OX=2049428; GN = C4517_04325 PE=4 SV=1
MHKFIQEILAFIGQTPIRDESLIRFTFKLEKVEIERLFELLSNEETLFFFSKPSGNRANLGVGKIESPFTEKLIETISKGNLEPNELIISANYDSSLMSKIPLVFGGEKFLPDKKENLWSDYPNQSWFIPQVLIASGIENTLIIFQFVGNNPNLKIFEKILDLLPLDTLVKTESATDYEILSATELEEWSRIINAGLDEITKHNIEKIVLARRMQLVLKSNFSISSFLSKLQTKYPECITFAYKENDSIFFGSTPEKLFTLDGNKIETEALAGSIARGANLNEDLVLESNLLNNQKDINEHNNVLSFLLSNLEDFSEKISYNPKPQIKKLQNIQHLQTPIKAMLKEGVDILELLRKLHPTPAVCGLPQKKAWELIEDLEYFDRGLYAGVVGWFNEKRKCEFSVGIRSAILKNNMLTAYAGCGIVEGSDPISEYHETELKFKPILSLLENEIINQP

SEQ ID NO: 94051 - protein, 402 aa, Indibacter alkaliphilus
  REGION 1..402: note = tr|S2EAF3|S2EAF3_9BACT Isochorismate synthase; OS = Indibacter alkaliphilus LW1 OX=1189612 GN=A33Q_0686; PE = 4 SV=1
MNIETLSDRNTLTVTNYLKNLIALQLQQGNQFAIWRKPKSGFIQVLIDKTGKTKRVPLHLEELKPGFIVHPFEDQEDQKAFYLEANTYFKIDLNIPFEEQMEKIDQLPNLGNEPIKSDGLQKYFVPESATPWTKTSEECGKSGFIELVNKSLKAIKNGELSKIVPARIKKIRLNESFELVTAIKNLLEAYPNAFVNFFHIPGVGTWLGASPEILIQTKGDSFYTMSLAGTQKATGDNPLKNVAWTQKEIEEQALVSRYIVDCFKKIRLREYEEHGPKTVVAGNLLHLRSDFNVNMNSTNFPQLGSVMLELLHPTSAVCGMPRKEAFQFLRDHESFDRSIFAGFIGPVNVEDETSIYVNLRTARLLEGNAILYAGAGVTEDSDPEQEWEETEMKCEIIGKHLT

SEQ ID NO: 94052 - protein, 457 aa, unidentified
  source 1..457: note = Unknown
  REGION 1..457: note = tr|A0A2H9TAN2|A0A2H9TAN2_9ZZZZ Isochorismate synthase MenF OS=invertebrate metagenome OX=1711999; GN = menF PE=4 SV=1
MTKDTLWLAPLIKQLKGLSGQKFPHGFSCRVACSVDPVEMTHWLSIQNIPLKSFWRNRKGNLSIAGLGQAWEYRLHHRNDIAPCFRQISQLLKNNSTDLSPLQCLGFIAFSDQQQCTWESFGYGHFFLPAIELRKNTWGYQLACHLFYDNPQQWQTMINKRVEQLSHLDWSTTSKKHHSCALTPAGYIPDETQWQHLMTQSQQAFRDKQFRKVVLSRESRFSFDGTLSPWEILRRWHEANPYSYTYAFQETPGHVFFGCSPESLFHRRGLSITTEALAGTISRGTDRYTDQEKADYLLSDPKNITENRLVLDDIKQRLNPVCTHLKADKTHSLLKLKNLQHLRYLIRGRLIPDVKDEDLIRILHPTPAIGGLPREQAMAFIHREEPYARGLYAGICGIVGLNDTELNVSIRCARLAPGKLSLYSGAGIIPASRSLDEWEELDNKISTIRHILHTICT

SEQ ID NO: 94053 - protein, 398 aa, Iodobacter fluviatilis
  REGION 1..398: note = tr|A0A377SRJ7|A0A377SRJ7_9NEIS Isochorismate synthase dhbC OS=Iodobacter fluviatilis OX=537 GN=dhbC; PE = 4 SV=1
MNDLFRGELRTQAQYLLSGYQTDSAMFFASSRQTLLAQGHYATVPAANSLDALNQAVALALKQAKATGHLDPVVVGAIPFDGRKSACLSIPRSVLRAGPLPQSLAQPKPQAVPCSITPLPEPQAYADGVALAVQHLQNKDLDKVVLARALDLAAEQAVDIPKLLVTLAQRNAHGYTFAVNLSDQAEVQPRILIGASPELLLRKKGSQVFSNPLAGSAARSPDPKIDRERGEALLQSAKDLHEHAVVVNAVADGLRPFCRTLIVPERPVLMHTETMWHLSTEISGELIDEETTSLMLASALHPTPAVCGHPNQNARDLIAQIEPFDRGFYTGMLGWCDANGDGEWIVTIRCAEVAGKSLRLFAGAGIVADSSPQSELAETSAKFRTMLNAMGLVHAGAV

SEQ ID NO: 94054 - protein, 398 aa, Iodobacter sp.
  REGION 1..398: note = tr|A0A2G3JF77|A0A2G3JF77_9NEIS Isochorismate synthase OS=Iodobacter sp. BJB302 OX=1506510; GN = CSQ88_02690 PE=4 SV=1
MNDLFRGELRTQAQYLLLGYQTDSAMFFASSRQTLLAQGHYATVPAANSLDALNQAVALALKQAKATGHLDPVVVGAIPFDGRKSACLSIPRSVLRAGPLPQSLAQPKPQAVPCSITPLPEPQAYADGVALAVQHLQNKYLDKVVLARALDLAAEQVVDIPKLLVTLAQRNAHGYTFAVNLSGQTEAPPRILIGASPELLLRKKGSQVFSNPLAGSAARSPDPKIDRERGEALLQSAKDLHEHAVVVNAVAAGLRPFCRTLIVPERPVLMHTETMWHLSTEISGELIDEETTSLMLASALHPTPAVCGHPNQNARDLIAQIEPFDRGFYTGMLGWCDANGDGEWIVTIRCAEVAGKSLRLFAGAGIVADSSPQSELAETSAKFRTMLNAMGLVHAGAV

SEQ ID NO: 94055 - protein, 461 aa, Isoptericola dokdonensis
  REGION 1..461: note = tr|A0A161ILB8|A0A161ILB8_9MICO Salicylate biosynthesis isochorismate synthase OS=Isoptericola dokdonensis DS-3 OX=1300344 GN=pchA PE=4 SV=1
MVGAMSATPYPAPVPPSGASAGTPTAAPEAQHLVVRTVRIDSLPGGPTALVDLLPDARPLTWVRRGDGIVGWGEALRLDTFGPGRFADADAAWRALLARAVVRDEVRLPGTGPVAFGTFAFDDGPTGDAFDDERPQGTLVVPRVVVGRRGTVTWMTTTSVGPTLDAPGDAALAAAHRVPVTSPGRVTLVDGAVGSVDWPGVVAEAVDRIRSGALEKVVLARDVVATTEHPLDPRFLLGRLAEGYPSCWTFSVAGMVGATPELLVRSEKGLVTSRVLAGTIRREPGMTDDDSLLHAAQLARSSKDLEEHEFAVRSVADALEPFCSSMNVPDAPFVLHLPNVMHLASDVTGVLDPASRSGSLTLAAALHPSAAVCGTPTVAARDLIREIEGMDRARYAGPVGWVGADGDGEWGIALRSAELGDDPHHLRLFAGCGIVAASDPAAELAESEAKLVPMRWALGAD

SEQ ID NO: 94056 - protein, 465 aa, Isoptericola variabilis
  REGION 1..465: note = tr|F6FV93|F6FV93_ISOV2 Isochorismate synthase; OS = Isoptericola variabilis (strain 225) OX=743718; GN = Isova_0577 PE=4 SV=1
MSATPLPAPAPRPGEPAGTAEPLPLVVRTTRIDGLPDGPTALLDLLPDTRPLAWVRRGDGIVGWGEALRLETDGPGRFADAESAWQATLARAVVRDDVRLPGTGPVAFGTFAFDDDGGYEDHFTDDALRGRRAGTLVVPRVVVGRRGDVAWMTTIRPAGALDVAPGAAALARTRRTPVTGPGTVTFTDGAVAAQDWPALVGEAVDRIRAGELEKVVLARDVVATAEHPVDARHLLTRLADAYEACWTFSVGGMVGATPELLVRSEKGLVTSRVLAGTIRREPGMSDDDALLHAAQLARSSKDLEEHEYAVASVARALQHYCTSMNVPDAPFVLHLPNVMHLASDVTGVLDRSGLYNGGRPPSSLALAAALHPSAAVCGTPTVAARELIREIEGMDRSRYAGPVGWVGSDGDGEWGIALRSAELSDDDPRHVRLFAGCGIVAASDPAAELAESEAKLQPMRWALGS

SEQ ID NO: 94057 - protein, 390 aa, unidentified
  source 1..390: note = Izhakiella sp.
  REGION 1..390: note = tr|A0A4P8YIQ0|A0A4P8YIQ0_9ENTR Isochorismate synthase OS=Izhakiella sp. KSNA2 OX=2579935 GN=FEM41_12940; PE = 4 SV=1
METIVAEERQQVVAVPATDGFFFMSPWKSLATSGHFASLELPAADGADPRGAFQRRLAQAFASARAAGIARPIAVGAIPFDTRKPSSLFIPEQVTTFSRANYQKRDPAAFCAPAVTGRKEIPEQPVFEEMVARAAYATSQPGIDKVVLSRLIDITTESAVDREALMQRLIALNPASYNFHVPLADGGALMGASPELLLRMNGNAFSSLPLAGSAKRVADPEQDKAVGQTLMNSRKDRHEHQLVTDAMRDVLAPRVSYLALPDRPELITTPQLWHLSTPIEGQVRDGRENALSLACLLHPTPALSGFPNDVAQRLIGELEPFDRELFGGIVGWCDDAGNGEWVVTIRCARLYEQQIRLFAGAGIVPDSSPTSEWNETGTKLSTMLNVFGLN

SEQ ID NO: 94058 - protein, 433 aa, Janibacter limosus
  REGION 1..433: note = tr|A0A4P6MYE3|A0A4P6MYE3_9MICO Isochorismate synthase OS=Janibacter limosus OX=53458 GN=EXU32_12660; PE = 4 SV=1
MTSPSPVDVPHPLGSQHPALVVRTVAVPTARVGDLLALLPEPEDAGDIVSWVRKGEGFVGWGRVATFRATGVDRFEQAQSWWRGVTSEAIVRDDVDEPGTGPIAFGSMAYSRRSGTESVLVVPEVVVGRRGDLAWVTTTTTDSTVPPADEPLAAQPDPRDPGEVVFADRDLSTQGWAQAVEEAVARISTGTLDKVVLARAVQATAGHRIDPRWLLTRLAEDYDTTWVFAVDGLVGATPEMLVRLERGLVTSRVLAGTIRRTGDDSHDLALAGSLARSSKDLEEHEYAVRSVADALTAHTSSINVPETPFVLHLNNVMHLATDVAGVVRDGSTSLALAASLHPSAAVCGTPTMDADTVIAELEQMDRGRYAGPVGWMDASGDGEWGIALRCGWYESPQSLRLYAGCGIVAGSVAEDEVAESVAKLMPMRSALGG

SEQ ID NO: 94059 - protein, 441 aa, Janibacter melonis
  REGION 1..441: note = tr|A0A3M9JCC0|A0A3M9JCC0_9MICO Isochorismate synthase OS=Janibacter melonis OX=262209 GN=EEW87_09315; PE = 4 SV=1
MTTLDPALARLDARTSPSSSPRLVCRTVRVPATRVGDLLALLPDDTSQVLSWVRRGEGLVGWGEVAGLSVTGEDRFGRAQDWWREITAVADVDDEVEVPGTGPICFGSMAYSARSQTPSRLVVPAVVVGRRGRDAWVTTTWLEGEKPSPVDDAVEISLRPSPAPRAPESIRFSDGDLSAGSWAGIVEQAVARISAGELDKVVLARSLDVEADSRIDPRWVLQRLAQDYDTTWVFSVAGLVGATPEMLVRLERGLVTSRVLAGTIRRTGDDSHDLALAGSLARSSKDLEEHEYAVRSVADALAAHTSSINVPESPFVLHLTNVMHLATDVAGVVDDTSTSLALAASLHPSAAVCGTPTPVADGLIGELEQMDRGRYAGPVGWMDATGDGEWGIALRCGAQTSPTSLRLYAGCGIVAGSDAASEVAESDAKFLPMRQALTPPA

SEQ ID NO: 94060 - protein, 423 aa, Janthinobacterium agaricidamnosum
  REGION 1..423: note = tr|W0V7X3|W0V7X3_9BURK Isochorismate synthase dhbC; OS = Janthinobacterium agaricidamnosum NBRC 102515 = DSM 9628 OX=1349767 GN=dhbC PE=4 SV=1
MNDRLHHVFSEQASAADLLLHYQAGATFFASPRRSLLAHGVQAVLPPCAPGRIAAHAAAFLKDAAGGRATPAVLMGALPFCLDSSSAAPYLYLPRQLASGAGVDHAAAGPGLALGNPGARLPGAPLMQPTPQQYRANVRRALADIGAARFEKTVLSRSLTLDASIDLPVLLQRLAARNLRGYTFAINLAGAAIGQAGAPRTLIGASPELLLSRHGRALVSHPLAGSIPRSADPAEDRRRADGLLQSAKDLHEHALVVEAVAAAMRPYCKTLHVPAAPSLLSTATMWHLGTQVRGELADPATTSLEVALALHPTPAVCGHPAAPAASFIAEAEGFDRRYFAGLVGWCDSHGDGEWAVTLRCAEVGAAGATLYAGAGIVAGSEPQLELLETSAKLRTMLAAMNLELQLEDEPTGEQLYEHAKAVS

SEQ ID NO: 94061 - protein, 402 aa, Janthinobacterium sp.
  REGION 1..402: note = tr|A0A0S4K0J7|A0A0S4K0J7_9BURK Isochorismate synthase of siderophore biosynthesis OS=Janthinobacterium sp. CG23_2 OX=1706231 GN=BN3177_2775 PE=4 SV=1
MNDRLHGHYLSRSSAADLCAHYEAGATLFSSPGHTLLAGGKRSILAPQSGSALAGAAASLLRTARRDGEALPVMIGAVPFLADAPAHLFIPEHVMMATGPANLPAANPQAPPARARFPRTIESIPTQDQYQRAVARAVERIRAGQLDKVVLSRSLTMETEIDVAGLLARLGARNAHGYTFAIDLAPDADGRRTLIGASPELLLSRHGTRVRCHPLAGSIPRSLDAHEDQRRAQGLLQSQKDLHEHALVADMVADSLRPYCHSVTVPAVPSLIATPTMWHLGSEVTAQLNEPGMSSLALAMALHPTPAVCGHPAALARSFINEAEGFDRGFFAGLVGWMDANGDGEWAVTLRCADVGAHSATLYAGAGIVAGSDPELEFLETSGKLRTMLRAMGLEAVLEEAA

SEQ ID NO: 94062 - protein, 373 aa, Jejuia pallidilutea
  REGION 1..373: note = tr|A0A090W603|A0A090W603_9FLAO Isochorismate synthase OS=Jejuia pallidilutea OX=504487 GN=JCM19301_3352; PE = 4 SV=1
MVLDDFFKAVAQQYKNKLPFVIYRKPNTLDVKGMLQKDTALHITEDFKASGFVFAPFDDKFPAIILPVQYSKQILTTYKQSNLNTSYSSKTFNTYDKEKNFHINLVKKGINLIKKGELQKVVLSRKETVAFQNEDIFSIFQKLLATYTSAFVYCWYHPEIGLWLGATPETLLKIEDRNFSIMALAGTQNYNGTLNVVWQNKEIKEQQFVTDFILNNIKSRVENIKVSNVETVKAGNLLHLRTLIKGRLSSQNFNLKKLLYDLHPTPAVCGLPKALAKTFILENENYNRTFYTGFLGELNIEATVTPRTGKRNIENRAYALKRKSTQLYVNLRCMEINGNEAFIYVGGGITDTSNPESEWEETVSKSMVVKKVL

SEQ ID NO: 94063 - protein, 464 aa, Jeotgalibacillus alimentarius
  REGION 1..464: note = tr|A0A0C2VEH8|A0A0C2VEH8_9BACL Isochorismate synthase OS=Jeotgalibacillus alimentarius OX=135826; GN = KP77_24320 PE=4 SV=1
MRILHQSQGFTTFEQAVSRAEKSNRSVLYSKTMEIDTIDPLQFYEAGYSIFNGTRTFWQDPKSEAVFAGAGAARTFYIEDKNRFDALSNQWNAFLKDAVIDNESSVGGPVILGGFSFDPEKDKSHEWSSFKQGYFQLPAFMLTVNQYGHAFLTMNIVCNKGENAVSVWNRMQQQKEALLNKSVSTLQDVNVVSIKEYEPDEWRSSITSVVQRIDNKELEKVVLARKVKVQFDDKKRSDSVLEKLRDDQSESFIFSFEAGDSCFIGATPERLIKKNHNKVLSTCLAGSIARGNTMEEDQQLGHELLNDQKNLGEHEIVVRMISKSLEDLCHQLTVPKQPVLMKMRDIQHLYTPVEGETDRASILEFVKELHPTPALGGTPTHKAMEMIREEEEMDRGFYAAPVGWLNAAGDGEFAVAIRSGLLSGEKAYLYAGCGVVRDSDAESEYQETLIKLRPMVRAVGGTIS

SEQ ID NO: 94064 - protein, 468 aa, Jeotgalibacillus campisalis
  REGION 1..468: note = tr|A0A0C2RV12|A0A0C2RV12_9BACL Isochorismate synthase OS=Jeotgalibacillus campisalis OX=220754; GN = KR50_31360 PE=4 SV=1
MVRILQQSHGLAAFERAISLAHQSKREVLFSQVTLIDEVDPLQFYEAGYKLYQGERSFWQDRTGELTLVGAGNAQTFTSNKKNERFIDIKKQWNEFLLEAVRTGENHAGTGPVAVGGFSFDPRQEAELEWTNFSNGYFQLPSFMLTVNAKGDCFLTSNIVCSEFDDSKKLWERMQEERNQLLSDTEESMKDVSVIKTTEIEPVKWKTSLTSVVKRLKKGEMEKVVLARKILVDFDGKKRSDTVLERLRDDQSASFIFSLEVLDSCFIGATPERLVKKSDEHILSTCLAGSIARGATLEEDQHLSDLLLNDEKNLHEHELVVRMITENLKDLCREVTVPSSPALMKIRDIQHLYTPVKGIAQKGMSVVDFVDRLHPTPALGGTPTHLAMDVIQKEEKMNRGFYAAPVGWMDAEGNGEFAVAIRSGLLHDRHAYLYAGCGVVKDSNAESEYQETLIKFRPMLRAVGGTMQ

SEQ ID NO: 94065 - protein, 464 aa, unidentified
  source 1..464: note = Jeotgalibacillus malaysiensis
  REGION 1..464: note = tr|A0A0B5AV52|A0A0B5AV52_9BACL Isochorismate synthase OS=Jeotgalibacillus malaysiensis OX=1508404; GN = JMA_25520 PE=4 SV=1
MRILHQSQGFTTFEQAYEMAEKSNQPVLYSKTMEVESIDPLQFYEAGYSIFNGSRSFWQDPKSELVFAGAGSAKTFYIKEEERFDSLSVQWKSYLKNAVIEKGKAWTGPVILGGFSFDPKKKKSVEWSAFEQGYFQLPAFMLTVDQYGKTFLTMNVECKKGDHAVQVWNQMQKQKTALLNKSVSSLKDVNVLAIKEFDPEEWKSSLTSVVGQISRGEVEKVVLARKVKVTFDDQKRSDSVLEKLRDDQSESFIFSFESGDSCFIGATPERLIKKHQQQVLSTCLAGSIARGKTVEEDQQFGNELLNDEKNLGEHEIVVRMISKSLEDLCSELTVPDQPVLMKMRDIQHLYTPVEGMTARSSILEFVKELHPTPALGGTPTSEAMQIIREEEEMDRGFYAAPVGWLNAEGDGEFAVAIRSGLLSGKHAYLYAGCGVVKDSDAEGEYQETLIKLRPMVRAVGGTIS

SEQ ID NO: 94066 - protein, 398 aa, Jeotgalibacillus marinus
  REGION 1..398: note = tr|A0A0M0KTK7|A0A0M0KTK7_9BACL Isochorismate synthase OS=Jeotgalibacillus marinus OX=86667; GN = AMC98_14085 PE=4 SV=1
MLEQNVISQTKAEHLLHEYQPGAFFLASPHRVLLAKGICEIVPEADGQNQIKTLSGRIAETLNQAKQSGQSRPLVVGAVPFDHVKAARLVVPEDVRWSGPLQFDHAEKEQQPEHTYHIEPVPAPEGYKNGVEQGLARIADGTLSKIVLSRSLHLTSSEPIQTDELLRHLAQHNTHGYTFAADVSSEAETPSRRTLLGASPELLVSRMGTQVVSNPLAGSRPRSNDPAEDQRRADELLSSAKDLHEHAVVADAVAAALRPFCRTLDVPEKPSLIKTETMWHLSSVIKGELSDPSVTALELAAALHPTPAVCGTPTDLAREAIHSIEPFDRGFFTGMVGWCDNAGDGEWIVTIRCAEAEERSLRLYAGAGVVAGSKPEDELQETSAKFRTMLRAMGVNHI

SEQ ID NO: 94067 - protein, 464 aa, Jeotgalibacillus salarius
  REGION 1..464: note = tr|A0A4Y8L841|A0A4Y8L841_9BACL Isochorismate synthase OS=Jeotgalibacillus salarius OX=546023; GN = E2626_15830 PE=4 SV=1
MRILHQSQGFTTFEQAFEIAEKSNQPVLYSKTMEIEAIDPLQFYEAGYSIFNGERSYWQDPKSECTYAGAGSAKTFHIKETDRFNALSEQWKRFLKDAVIEKGAVWTGPVILGGFSFDPEKNKGAEWGSFNQGHFQLPAFMLTVDQYGKSFLTVNVVCNKGEHAVTVWNQMQKQKAALLNKTVNSLKDVNVLSIKECQPLEWKSSLTAVVERINRDELEKVVLARKVKVEFDDRKRSDSILEKLRDDQSESFIFSFEAGESCFIGATPERLIKKYKNKVLSTCLAGSIARGKTMNEDQEFGKELLSDEKNLGEHEIVVRMISQSLEDLCSHLSVPDQPVLMKMRDIQHLYTPVEGITERDSILEFVKKLHPTPALGGTPTHKAMEIIREEEEMDRGFYAAPVGWLNAEGDGEFAVAIRSGLLSGKHAYLYAGCGVVKDSDAESEYQETLIKLRPMVRAVGGTIS

SEQ ID NO: 94068 - protein, 468 aa, Jeotgalibacillus soli
  REGION 1..468: note = tr|A0A0C2V4J4|A0A0C2V4J4_9BACL Isochorismate synthase OS=Jeotgalibacillus soli OX=889306 GN=KP78_37760; PE = 4 SV=1
MVRIIQQSHGYAAFEHAFEKAYQFKRDVLFSMVIPIDPVDPLQFYEAGYQMFQGERSFWQDRDGELALIGVGNAQTFTSNPLNDRFTTIQQQWSQFLEHAVYFGVQKIGTGPIIMGGFSFDPRQEAELEWSNFSDGYFQLPSYMLTIDQYGAAFLTTNIICSEGDHAKTIWARIQANKELLFTRLQDHIKDANVVQTIEVNPERWKNTIGFVVKRLQKEEMEKVVLARKIKVEFDGKKRSDTVLERLRDDQPDSFIFSLEVLDSCFIGATPERLVKKENESILSTCLAGSIQRGNTTEEDNRLGQLLLHDEKNLHEHQLVVNMIKSSLTDLCEVVHVPSQPALMKIRDIQHLYTPVKGIASKGISILDYVRNLHPTPALGGTPTHLAMDVIREEEGMNRGFYAAPVGWLDAQGNGEFAVAIRSGLLHDHHAYLYAGCGVVADSDPESEYQETTIKFRPMLRAVGGTIK

SEQ ID NO: 94069 - protein, 468 aa, Jeotgalibacillus sp.
  REGION 1..468: note = tr|A0A4R5XTB6|A0A4R5XTB6_9BACL Isochorismate synthase OS=Jeotgalibacillus sp. S-D1 OX=2552189; GN = E2R51_00125 PE=4 SV=1
MVRILQQSHGFAGFERAFEQAQQSKRDVLFSMVTPIDSVDPLQFYESGFKLYQGERSFWQDRNKDLVLVGVGNAKTFTSNERDHRFMDIKNQWTTFLADAIQVGDKILGTGPLVMGGFSFDPRQEAELEWTNFSHGHFQLPSFMLTNDRQQGSFLTVNIVCTASDNPKKIWDRMQLEKNNLFETFNQQIEDVNVIRTTEIQPDQWKKTLTSVVKRLNKGEMEKVVLARKIKVDFDGKKRSDTVLERLRDDQTNSFIFSLEVLDSCFIGATPERLVNQSNRSILSTCLAGSIERGETIEEDERLSRLLLNDEKNLHEHDLVVKMISQNLRALCSEIEVPNGPALMKIRDIQHLFTPVKGTANNGMTILDFVDRLHPTPALGGTPTHLAMDVIQEEERMNRGFYAAPVGWMDAEGNGEFAVAIRSGLLHDQHAFLYAGCGVVKDSNADSEYQETLIKFRPMLRAVGGTMQ

SEQ ID NO: 94070 - protein, 464 aa, Jeotgalicoccus nanhaiensis
  REGION 1..464: note = tr|A0A4Y9HIM9|A0A4Y9HIM9_9STAP Isochorismate synthase OS=Jeotgalicoccus nanhaiensis OX=568603; GN = E4T89_09480 PE=4 SV=1
MKLQSSRIFIESISLDSDRQYLTLHIPMDEYNIDEEKIFTYFDESKGSRYWFKSKDNTYNVVGINYIESMWRDKFQPESAADSKKTLFAKLQQEKLGDNLKSKLSLFGGTLFDDKDTTDEWNDFKMIEFHLPEWQFDLNNHEVFLTREKTELNMDDVLDEVDGVLSAIENTVITEKEKPVVKSKRDIFPNEWKMLVEEAVNNLNDEFKKVVLARQKLITFESRAKRLYLIRRLKDEADTYTIYYEKGKSTFVSKTPEKLFSIRGEELVTNAIAGSIQRVEDSRENDLQKDFLLNDEKNLFEHRVVRESIVSDIVPFSEGLNYKKNPLLLENKYIYHLFTPIQAMLKKDADEFKILKRIHPTPAVGGLPKKLAKDYIKDHEYGTRGLYAAPLGIIHEDKECEFAVGLRSMLISARSATLFAGCGIVKGSDPEAEFLETEVKFTPMLNVLEATTNELYGSTNDTNI

SEQ ID NO: 94071 - protein, 416 aa, Jiangella sp.
  REGION 1..416: note = tr|A0A4R5A004|A0A4R5A004_9ACTN Isochorismate synthase OS=Jiangella sp. 8K307 OX=2530373 GN=E1262_28895; PE = 4 SV=1
MVVTTLPASAPMVVRTTEVPDPGPLLELLPEDFPMAWVRQGEGVVGWGQAARFDTIGANRFVAADRWWRRMVGTAVVRDEVRLPGSGPVAFGSFAFDDVPGSSSLVLPDTVVGHRSGRWWVTTIDVTGNLPGGAALPDVSRARRPAAVAYADGAHSGTEWEAIVAEAVRRITAGELEKVVLARDLIAESPEPIDLRWPLQRLSDGYPHCWTFSVDGMIGATPELLVRRERGLVTSRVLAGTIRRTGDDEHDLALAASLARSSKDLEEHEYAVRSVADALAPFCSSMNVPESPFVLHLPNVMHLATDLAGVTDSDASSLALAAALHPSAAVGGTPTAVALDVIREIEGLDRARYAGPVGWMDGRGDGEWGIALRSAEVSGSRLRLFAGCGIVAGSDPAAELAESVAKLVPMRDALSS

SEQ ID NO: 94072 - protein, 392 aa, unidentified
  source 1..392: note = Kalamiella piersonii
  REGION 1..392: note = tr|A0A3A9IPT7|A0A3A9IPT7_9GAMM Isochorismate synthase OS=Kalamiella piersonii OX=2364647 GN=D7S44_12730; PE = 4 SV=1
MVETLTFGNPQLQDFSALCRGFIFTSPWRSIATQGCYTTVTTPVTDGDALNGDFQQQLRRHFAAAKKQGIAHPILVGAIPFDVTQPAALFIPESHQTFDRADLQGALTAVQAPLPQVRRRAAVPEHDAFTAMVAQAVMATQRGELDKVVLSRLMDIVTEQPVDIAALMQRIVAQNPDSYHFHLPLPQGGSLVGASPELMLRKEGRDFSSCPLAGSARRDAVAARDRAAGDALMQSAKDRHEHKLVTDAMREVLQPRSRLLSVPATPSLLTTATLWHLATQIDGEALDEQENALSLACLLHPTPALSGFPHQRAQQLIQTLEPFDRRLFGGIVGWCDDQGNGEWVVTIRCGTVQGARVRLFAGAGIVADSQPESEWRETGVKLDTMLRAFGLQ

SEQ ID NO: 94073 - protein, 408 aa, unidentified
  source 1..408: note = Kangiellaceae bacterium
  REGION 1..408: note = tr|A0A2E2VR49|A0A2E2VR49_9GAMM Isochorismate synthase OS=Kangiellaceae bacterium OX=2026751; GN = CMF25_05125 PE=4 SV=1
MRDTTFVDSTLNGSNGSSAHAALLHASPRLLEQYQPESSVYFASPERALLAMPPFASLLVAGMQDLSQQASESLKLARDLGFERPIVVGALPFNTNEKPLLRVSIQSEWEETPVKPQLTAVKAVDAESISAYPAPEHYMAGVKDALTRFARGELDKVVLSRTLEVSCKQRPDVKALLNNLAAKNHHGYTFAVDFPAEDGQSKPATLIGASPELLLSHRGNKIIANPLAGSEPRSSDPQEDRQRAQQLLASQKDRYEHAIVIEAVAEALRPFCRDLDIPEQPELIQTETMWHLSTVIEGELKNTDTSSLELALAMHPTPAVCGFPKAEAQQAIKDIEPHQRGLFTGMVGWCDSAGDGEWVVTIRCAQIQDCAIRLYAGAGVVAGSCPEKELAETGAKFNTMLQAMGVCI

SEQ ID NO: 94074 - protein, 411 aa, unidentified
  source 1..411: note = Ketobacter sp.
  REGION 1..411: note = tr|A0A3L8BLH8|A0A3L8BLH8_9GAMM Isochorismate synthase OS=Ketobacter sp. OX=2083498 GN=D9N14_12455 PE=4; SV = 1
MPVIDEGPHMTSHLPSHLYFAATLYDHLLRYHRGDFVFSSPRQSIMASGIALEDWAGGHAEILERADQLLARAREQGWRRALLMSAIGFDVSAPSRLVIPRYVEAMPQLDHSAIPSAPVSSVRRDQPAQLTAMTPTPQAYQDLVSKAVRSIREGEFEKVVLSRSLSVQARIDLAALLATLAQRNPAGYTFAFDRQHQGQQRTLVGASPELLLSKCGPHILSNPLAGSLPRSHSVAENQRRANELMHSEKDRYEHALVVDAVATALAPFCKQLSVPPEPSVLETPTMLHLSTAISGELHGADTSSLALALALHPTPAVCGHPRQPAHHFIQQQEGFDRSLFTGLVGWCGQDGNGEWAVTIRCADVGDDDATLYAGAGIVEGSQPDKELTETSAKMGTMLAAMGLESLMEASL

SEQ ID NO: 94075 - protein, 372 aa, unidentified
  source 1..372: note = Kibdelosporangium phytohabitans
  REGION 1..372: note = tr|A0A0N9IEB7|A0A0N9IEB7_9PSEU Isochorismate synthase OS=Kibdelosporangium phytohabitans OX=860235; GN = AOZ06_18265 PE=4 SV=1
MHADVTAAAPAELLSDYQPGAFFLSSPAGVVLADEPSAVHTTIAAATQALQAAGGVLAGAIPFARTAPARLGLYSSVRHGQPWHMATPTLSPLDRPDFSGADDSRDVYVAGVRAALERIQSAELSKVVLARVLDLRSDRPVLTGKLLERLVARDPYGYTFATDVGAGSLVGASPELLVSRRAGLVTANPLAGSAPRHADPVQDGRNATGLLVSEKDRHEHEVVVKAVAAGLAPLCARVVVPPTPELLPTRTMWHLSTLIEAEPLPGVSALDLAIALHPTPAVCGTPTEPARALIGELEPFDRGFYTGLVGWTDAAGDGEWAIALRCGVVDGTSLRLYAGAGIVAGSDPDKELAETTAKFRTFLNAIGLGDLT

SEQ ID NO: 94076 - protein, 370 aa, Kibdelosporangium sp.
  REGION 1..370: note = tr|A0A0K3BAV4|A0A0K3BAV4_9PSEU Isochorismate synthase of siderophore biosynthesis OS=Kibdelosporangium sp. MJ126-NF4 OX=703222 PE=4 SV=1
MELTDQYRPGAFFFATPERTLLADEPRHVLSEKDTDALSVQVNDALTEFGGIAVGALPYDHTGEAHVLLPTSVSWSGPSRPARHQAMVLPGHQVTPEPEPSEYERQVARALTLLDDSPLGKVVLARTLRIDLDEPIDMRRMLASLAAMNTHGYTLAAPLPTPGVTLVSASPELLVRRTGMKFVSRPLAGSQPRGKDPVTDRDNAQRLLASRKDHDEHRWVVEAEVEALRPFCGRLDVPRAPSLLSTPSMWHLATKITGELADRDVTALTLAAALHPTPAVCGSPTDAARAAIAQIESFDRGFYSGAVGWVDANGDGEWAVAIRSADVTDHWLRLYAGAGIVHGSVPSLELAETSAKFQTLLRGMGLDLTL

SEQ ID NO: 94077 - protein, 401 aa, unidentified
  source 1..401: note = Kitasatospora aureofaciens
  REGION 1..401: note = tr|A0A0L8P6S1|A0A0L8P6S1_KITAU Isochorismate synthase OS=Kitasatospora aureofaciens OX=1894; GN = ADK78_27680 PE=4 SV=1
MPTAPEVATHVPLAEPAHPAVGAATALLDAYTPGARFLGTPTRTLLGQGTHSEVPHDERPLPQRVAATLDAARADGHGAPFVVGAVPFDQSAPAALTVPGSVRTAPPLTADPLIALPADPPAAAAWDIRPVPEPEVYGAGVAAAVERMWRGEFSKVVLARTLELTTPDPLDIPAMLQRLARRDPSGYTFALPTAPGRTLLGASPELLVSRRGDRVVANPLAGSTPRSDDLAEDVRRAAALLESAKDLHEHAVVVDAVHRALAPYCTDLTVPARPTLLRTATMWHLSTTVTGTLAAPDTSALELACALHPTPAVCGTPTDTARQVITDTEPFDRGFFTGMVGWGDASGDGEWVVTIRCAEAEERSLRLYAGAGVVAASEPAAETAETGAKFRTFLSAVGAEL

SEQ ID NO: 94078 - protein, 387 aa, Kitasatospora cheerisanensis
  REGION 1..387: note = tr|A0A066Z1E7|A0A066Z1E7_9ACTN Isochorismate synthase OS=Kitasatospora cheerisanensis KCTC 2395; OX = 1348663 GN=KCH_06110 PE=4 SV=1
MTTASELRPPAAATGSDLLAAYRPGPDRALLATPTRTLLAEGVHRLVDDPSTAARALAGARPDGGRRLLVGAIPFAPDAPARLFVPERVRTAGPVPAGGSAAPVASPGWRSRPVPEPDGYRSAVAEAVRRLAGDSPLEKVVLARTLELTSPGGADLAAMASRLVHRDPYGYTFAVPAGGSATLIGASPELLVSRRGERVVSNPLAGSAARSADPVEDLRRAEELLHSEKDLAEHAFVADAVRAALAPYCAELIVPERPTLLRTAAMWHLSSTVTGILREPSTSALELALALHPTPAVCGTPTDRARAAIGELEPFDRGLYTGVVGWGDAAGDGEWVVTLRCAEADGDRLRLFAGAGVVAASDPELELAETSAKFRTFLHVLGLEDAR

SEQ ID NO: 94079 - protein, 431 aa, unidentified
  source 1..431: note = Klebsiella aerogenes
  REGION 1..431: note = tr|A0A0H3FZE9|A0A0H3FZE9_KLEAK Isochorismate synthase MenF OS=Klebsiella aerogenes (strain ATCC 13048 / DSM 30053 / JCM 1235 / KCTC 2190 / NBRC 13534 / NCIMB 10102 /NCTC 10006) OX=1028307 GN=menF PE=3 SV=1
MLSVSTALESLLGCLAEDFPPSPGTRIFDIPFPLNDAFDPLLWCAHQPCWPQFYWQQRNGDEELAALGAVTTFASLSAAHDFLCAQGREDLRISGLNAFDPQQGHLFLPRLEWRRLGGKATLRLVVHSVTSLQDDAAAARAFLQSLNSEQATAVSMPPLQSEQHAPEYPQWRELITQATQAIGAGEMDKVVLARVTDLRFSAPLQAFAIMAASRRSNLNCFHFLMAFSPQQAFLGSTPERLWRRRGALLRTEALAGTVANHHDDARAQQLADWLMKDDKNQRENMLVVEDICQRLQGESPTLDVLPPQVVRLRKVQHLRRCIWCELAEPDDSRCLLQLQPTAAVAGLPRQAALAFIRRHEPFTREWYAGSAGYLSLAQSEFCVALRSAKVENDTLRLYAGAGIVSGSDPQQEWQEIENKAAGLRTLLLSET

SEQ ID NO: 94080 - protein, 391 aa, unidentified
  source 1..391: note = Klebsiella grimontii
  REGION 1..391: note = tr|A0A285B0F6|A0A285B0F6_9ENTR Isochorismate synthase 1 OS=Klebsiella grimontii OX=2058152 GN=entC PE=4; SV = 1
METSLAEEVREKKMTLPPESFFFMSPYRSFTTAGCFSRFSHPAADGDDPDGEFQQKMAAAFKAARTAGIARPVMVGAIPFDTSEPSELFIPASWTAFSRTEKQHSARYASGQNPMDVVQRREIPEQDTFMAMVARAAALTATPEVDKVVLSRLIDITTRERVDSGALLERLIAQNPASFNFHVPLSDGGVLLGASPELLLRKEGAHFSSLPLAGSARRQPDDVLDREAGHRLLASEKDRHEHELVTQAMKAVLAPRSSELSLPDSPQLITTPTLWHLATQIQGTALANENAMSLACLLHPTPALSGFPHQAAKRLIGELEPFDRQLFGGIVGWCDDEGNGEWVVTIRCARLQQRTLRLFAGAGIVPASSPLGEWRETGVKLTTMLNVFGLQ

SEQ ID NO: 94081 - protein, 391 aa, unidentified
  source 1..391: note = Klebsiella michiganensis
  REGION 1..391: note = tr|A0A0J2I5G1|A0A0J2I5G1_9ENTR Isochorismate synthase EntC OS=Klebsiella michiganensis OX=1134687; GN = entC PE=4 SV=1
METSLAEEVREKKMTLPPESFFFMSPYRSFTTAGCFSRFSHPAADGDNPDGEFQQKIAASFKAARAAGIAKPVMVGAIPFDTSEPSELFIPASWAAFSRTEKQHSARYASGQQPMDVVQRREIPEQDTFMAMVARAAALTATPEVDKVVLSRLIDITTRERVDSGALLERLIAQNPASYNFHVPLSDGGVLLGASPELLLRKEGAHFSSLPLAGSARRQPDDVLDREAGHRLLASEKDRHEHELVTQAMKAVLAPRSSELSLPDSPQLITTPTLWHLATQIQGTALANENAMSLACLLHPTPALSGFPHQAAKRLINELEPFDRQLFGGIVGWCDDEGNGEWVVTIRCARLQQRTLRLFAGAGIVPASSPLGEWRETGVKLTTMLNVFGLQ

SEQ ID NO: 94082 - protein, 431 aa, Klebsiella oxytoca
  REGION 1..431: note = tr|A0A0G3S9T6|A0A0G3S9T6_KLEOX Isochorismate synthase MenF OS=Klebsiella oxytoca OX=571 GN=menF PE=3; SV = 1
MLSVSTALESLYRCLDEAFPPSPGTRIFDVPFALNDAFDPLLWCTHQPQWPQFYWQQRSGDEELAALGAVQIFASLEQAHAFLRQQGREDLRICGLNAFHPQQGLLILPRLEWRRLGGSATLRLVLYSETSLRDDARAAREFLDSLVAKQAQATAVPSLLSEQHFPAYPQWRELIAQATQAIAAGEMDKVVLARATDLHFAAPLNAGAIMAASRRSNLNCFHFLMVFNAQEAFMGSTPERLWRRRGALLRTEALAGTVASHADDRQAQRLGNWLMADDKNQRENMLVVEDICQRMQGETRALEVLPPQIVRLRKVQHLRRCIWAELEKPDDARCLHQLQPTAAVAGLPRRVALDFITRNELFTRGWYAGSAGYLSLAQSEFCVSLRSAKIEQRTLRLYAGAGIVSGSDPEQEWQEIENKAAGLRSLLLSEV

SEQ ID NO: 94083 - protein, 118 aa, Klebsiella pneumoniae
  REGION 1..118: note = tr|A0A378CR51|A0A378CR51_KLEPR Menaquinone-specific isochorismate synthase OS=Klebsiella pneumoniae subsp. rhinoscleromatis OX=39831 GN=menF_2 PE=4 SV=1
MIARAAKAISAGEMDKVVLARATDLQFAAPLDAVSIMAASRRSNLNCFHFLMAFNARQAFFGSTPERLWRRRGALLRTEALAGTVANHQEDAKAQQLADWLMKDDKNQRENMLVVEDI

SEQ ID NO: 94084 - protein, 429 aa, unidentified
  source 1..429: note = Klebsiella quasipneumoniae
  REGION 1..429: note = tr|A0A2Z3FAN7|A0A2Z3FAN7_9ENTR Isochorismate synthase MenF OS=Klebsiella quasipneumoniae OX=1463165; GN = menF PE=3 SV=1
MLSVSTALARIRDGLSEPFPDSPGTRIIDIAFPLNDAFDPLLWCGQQPQWPQFYWQQRNGDEELAALGAVKSFPSLDAANRFLHQAGRQDLRICGLNAFAPQQGRLVLPRLEWRRCGGRAVMRLVLHSDLSLRDDAVTAGDFLASLTTAQATPGGVPPLLSERHSSDYPQWQAMIDQATQAIAAGDMDKVVLARATDLQFAAPLDAVSIMAASRSRNLNCFHFLMAFNARQAFFGSTPERLWRRRGALLRTEALAGTVANHQDDAKAQQLADWLMKDDKNQRENMLVVEDICQRLQSEASTLDVLPPQVVRLRKVQHLRRCIWTELAEPDDSRCLLQLQPTAAVAGLPRRAALAFIQRHEPFSREWYAGSAGYLSLAQSEFCVALRSAKVDNDTLRLYAGAGIVSGSDAQEEWQEIDNKAAGLRSLLCP

SEQ ID NO: 94085 - protein, 391 aa, unidentified
  source 1..391: note = Klebsiella quasivariicola
  REGION 1..391: note = tr|A0A556VHL9|A0A556VHL9_9ENTR Isochorismate synthase EntC OS=Klebsiella quasivariicola OX=2026240; GN = entC PE=4 SV=1
METSLAEDVQKHTQTLSPDSFFFMSPYRSFTTSGCFRRFSQPAVGGDALNGEFQQQMAAAFAEARAAGIRKPVMVGAIPFDTCQPSELYIPERWEAFSRPEKQRSARYAAPLEAMEVVERREIPEQDEFLAMVERAAALTATPEVDKVVLSRLIDITTRDRVDSGALMERLIAQNPASFNFHVPLSDGGVLLGASPELLLRKEGQRFSSLPLAGSARRQPDDVLDREAGNKLLASGKDRHEHELVTQAMKSVLGPRSSQLSLPESPQLITTPTLWHLATPIEGTALAEENAMSLACLLHPTPALSGFPHQAAKRLIAELEPFDRQLFGGIVGWCDDEGNGEWVVTIRCARLQQRTLRLFAGAGIVPASSPLGEWRETGVKLTTMLNVFGLN

SEQ ID NO: 94086 - protein, 431 aa, Klebsiella sp.
  REGION 1..431: note = tr|A0A564JSJ4|A0A564JSJ4_9ENTR Isochorismate synthase MenF OS=Klebsiella sp. WCHKl090001 OX=2153354; GN = menF PE=3 SV=1
MLSVSTALESLSGCLAEDFPPSPGTRIFDIPFVLNDAFDPLLWCCHQPHWPQFYWQQRNGDEELAALGAVKTFSSLSQAHAFLQRQGRDDLRICGLNAFDPQRGMLILPRLEWHRLGGNATLRLVLCSDTSLCDDARAAREFLRLLTTEQAQTTAIPYLHSEQHFPAYPQWRELIMQATQAIAAGEMDKVVLSRATDLHFAALLNAGSIMAASRRSNLNCFHYLMAFTSQEAFLGSTPERLWRRRGALLRTEALAGTVASHEDECQAQRLGDWLMSDDKNQRENMLVVEDICQRMQGETRALEVLPPQIVRLRKVQHLRRCIWAALDKPDDARCLHRLQPTAAVAGLPRQTALDFITRHEPFTRDWYAGSAGYLSLAQSEFCVSLRSAQVEQNKLRLYAGAGIVSGSDPEQEWLEIDNKAAGLRSLLLAET

SEQ ID NO: 94087 - protein, 429 aa, Klebsiella variicola
  REGION 1..429: note = tr|A0A5D1Y7T1|A0A5D1Y7T1_KLEVA Isochorismate synthase MenF OS=Klebsiella variicola OX=244366 GN=menF; PE = 3 SV=1
MLSVSTALARLQDGLGESFPDSPGTRIIDIAFPLNDTFDPLLWCGQQAQWPQFYWQQRNGDEELATLGAVKTFSSLDAANRFLCQTGRQDLRICGLNAFEPQQGSLVLPRLEWRRCGGRAVLRLVLHSDISLREDAATARAFLASLTTTQATPGAIPRLLSERHSSDYPQWQAMIARATKAISAGEMDKVVLARATDLQFAAPLDAVSIMAASRRSNLNCFHFLMAFNARQAFFGSTPERLWRRRGALLRTEALAGTVANHQEDAKAQQLADWLMKDDKNQRENMLVVEDICQRLQSEASTLDVLPPQVVRLRKVQHLRRCIWTELAAPDDSRCLLQLQPTAAVAGLPRRAALAFIQRHEPFAREWYAGSAGYLSLAQSEFCVALRSAKVDHDTLRLYAGAGIVSGSDAQQEWQEIDNKAAGLRSLLCP

SEQ ID NO: 94088 - protein, 393 aa, Kluyvera ascorbata
  REGION 1..393: note = tr|A0A378GKB4|A0A378GKB4_9ENTR Isochorismate synthase entC OS=Kluyvera ascorbata OX=51288 GN=entC PE=4; SV = 1
METSLAADEQEQHHHAAVSADNFFFMSPYRSFTTSGCFQRFTCPAEGGDAPDSAFQQGLASAFAEAKAAGIANPVMVGAIPFDTTQPSALFIPERCEAFVRTAKQHSSRYHASREPLSVVARQEIPESPVFLDMVARAAELTATPQVNKVVLSRLIDIEAEQALDSGALLERLVAQNPASFNFHVPLPDGGVLLGASPELLLRKEGAMFHSLPLAGSARRQPDDMLDREAGNRLLASEKDRHEHELVTQSMKKTLAPRSLQLTLPSTPQLITTPTLWHLATPIEGQAKAEENALTLACLLHPTPALSGFPHEAAKQLIAELEPFERDLFGGIVGWCDAEGNGEWVVTIRCARVKANSVRLFAGAGIVPASSPESEWRETGVKLSTMLNVFGLH

SEQ ID NO: 94089 - protein, 393 aa, Kluyvera cryocrescens
  REGION 1..393: note = tr|A0A2X3GE14|A0A2X3GE14_KLUCR Isochorismate synthase entC OS=Kluyvera cryocrescens OX=580 GN=entC PE=4; SV = 1
METSLAAETQQQQHQATIAADSFFFMSPFRSFTTSGCFTRFTCPAEGGDSPDSAFQQGLASAFAAAKAAGIDNPVMVGAIPFDTRLPSALFIPERCETFSRTAKQKSSRYSASREPMAVTARQEIPEHPVFLDMVAQAAALTATPQVDKVVLSRLIDITAEQTLDSGALLERLVAQNPASFNFHVPLPDGGVLLGASPELLLRKEGDHYSSLPLAGSARRQPDDVLDREAGNRLLASEKDRHEHELVTQSMKQTLAPRSLQLTLPQTPQLVNTPTLWHLATPIEGQAKAEENALSLACLLHPTPALSGFPHQVAKQVIAELEPFERDLFGGIVGWCDSEGNGEWVVTIRCARVKDNGVRLFAGAGIVPASSPESEWRETGVKLSTMLNVFGLH

SEQ ID NO: 94090 - protein, 430 aa, Kluyvera georgiana
  REGION 1..430: note = tr|A0A1B7K333|A0A1B7K333_9ENTR Isochorismate synthase MenF OS=Kluyvera georgiana ATCC 51603 OX=1354264; GN = menF PE=3 SV=1
MRSILAALQRLSALLADDFPALPGMRILEAAFPLNDAFDPLAWLNGQAVWPQFYWQQRSGKEEIAALDTVCTFSSLAQANAFLATLPRDDIRVCGVNAFEPTRGTLFLPRLEWRREAGRATLRLNLWSETSLAQDAERARACLAALSAHHSSAELSLHQESETHRPGKEGWCRLIQQATQAIRDGEFTKVVLARATDLTFSHAPDAGALMTASRRVNFSCYHFYMAFDARRAFLGSSPERLWRRRGVQLLTEALAGTVAAHDDPVIAQRLGDWLMHDDKNQRENGLVVDDICQRLQDVTHALDVLPAEIVRLRKVQHLRRRIQAELTQPDDTLCLLQLQPTAAVAGLPRAAALAFIDHFEPFTREEYAGSAGYLSRQQSEFCVALRSARVQDKTVRLYAGAGIVEGSDPEQEWQEIENKAAGLRSLLFSE

SEQ ID NO: 94091 - protein, 432 aa, Kluyvera intermedia
  REGION 1..432: note = tr|A0A1X0XG42|A0A1X0XG42_KLUIN Isochorismate synthase MenF OS=Kluyvera intermedia OX=61648 GN=menF PE=3; SV = 1
MHSISVALEQLREKLAGIDANSPGFYVFDVAFALNDAFDPLTFLASQSCFPQFYWQQRSGEDEAAALGQVLRFTSLAEARHFLDDNPEYDLRIWGLNAFVSQQGELFLPRLEWRREGGRAFLRLIVINDAAQRGDAEQARAFIDALVRAKSLPDVQMELVSQQHCPEQSGWEALVTQATQAIARGEMDKVVLARATDYRFSQPVNAAALMAASRRLNHHCFHYFIAFDPHNAFLGSSPERLWRRRGTSLRTEALAGTVANDTDDTRAAELGNWLMNDDKNQRENMLVVEDICQRLQRAAATLDVLPPQIVRLRKVQHLRRCIWTEMRHKDDAECLTLLQPTAAVAGLPRQAARAFITHYEPFAREWYAGSAGYLSLKQSEFCVALRCAKISGTTVRLYAGAGIVAGSDPTMEWQEIENKAAGLRSLLIMKHA

SEQ ID NO: 94092 - protein, 432 aa, Kluyvera sp.
  REGION 1..432: note = tr|A0A2T3XAN6|A0A2T3XAN6_9ENTR Isochorismate synthase MenF OS=Kluyvera sp. Nf5 OX=2116543 GN=menF PE=3; SV = 1
MLSISVALEQLREKLSGIDANSPGFYVFDVAFALNDAFDPLTFLASQPCFPQFYWQQRSGEDEAAALGQVLRFPSLAEARHFLNDNPEHDLRVWGLNAFDPQQGELFLPRLEWRREGGRASLRLIVLNGNAQQNDVAQARSFIDALVRAKSLPDAQMELVSQHHFPQQSGWEALVTQATQAITRGEMDKVVLARATDYHFSQPVNAAAVMAASRRLNHHCFHFFIAFDPHNAFLGSSPERLWRRRGTSLRTEALAGTVANDTDDTRATELGDWLMNDDKNQRENMLVVEDICQRLQHATSTLDVLPPQIVRLRKVQHLRRCIWTEMHHNDDAQCLTLLQPTAAVAGLPRLAARAFITQHEPFEREWYAGSAGYLSLKQSEFCVALRCAKISGTTVRLYAGAGIVAGSDPTMEWQEIENKAAGLRSLLIMKHV

SEQ ID NO: 94093 - protein, 474 aa, unidentified
  source 1..474: note = Kocuria indica
  REGION 1..474: note = tr|A0A4P6RNB3|A0A4P6RNB3_9MICC Isochorismate synthase OS=Kocuria indica OX=1049583 GN=KocCE7_02755 PE=4; SV = 1
MTPEFPAPRLSALTLPLSEVPAAAEFARNPDVRRLLGSADPATWIMRGKGIVGLGRVAAYRVRGGTRFTSARVWWDELRQDATVHDSVQRPGTGLLAFGAFAFAPSSTVDSGLMVPELVIGTDAHGAWLTLISTGPSEPTVEDVDAAWRRLVRAAPAVARPEEPDAAASSYPTAVPGTLDEQRWMEAVADGVGMIRAGELDKLVLARDVVVDTGRPIELGAVLGRLSERFATCWTYCVRLGPEQEGSEQEGPDDGEGAGRLLGATPEMLIRVHRGTATARVLAGTLDRQDLPDGANPEDFAGTELGGSEKQQREHRFAVDSLITGLSPYADEVSGGEHPFILALPNVWHLASDVTAQLRAGVDGTLPSALELAEAVHPTAAVCGTPTETAGAVIEDLERMDRGLYAGPVGWLDGAGNGEWGIALRGAVQLDAHRARVSAGCGIVAESDPRAELAETWAKLRPMLESLPARWDRE

SEQ ID NO: 94094 - protein, 526 aa, Kocuria rhizophila
  REGION 1..526: note = tr|B2GI34|B2GI34_KOCRD Isochorismate synthase; OS = Kocuria rhizophila (strain ATCC 9341 / DSM 348 / NBRC 103217 / DC2201) OX=378753 GN=KRH_05420 PE=4 SV=1
MTPEFPAPRLSALTLPLSDVPAAADLARDPDVRRLLASPDPATWIVRGRGLVGLGRAAAFRVRGGTRFTSARVWWDAVRDAARVTDPFALPGTGLLAFGAFAFAPSSTVDSGLMVPELVVGTSDDAAWVTLITSDPSPAPSDVDAAWRRLARLTPAAHDAAAPASDAASPSVRAGSTDIDAPAARAGATAETPRDAAARSDSGNASPEAATGRASADPVREVTGAAEGGAAASYPAAVPGALDEQRWMAAVADGVGMIRAGELDKLVLARDVVVDTGADIELGAVLGTLSERFDTCWTYCVRLGGEGSPNAGRLLGATPEMLIRVHRGTATARVLAGTLDRQDLPEGANPEDFAGTELGGSDKQQREHRFAVDSLIAGLSPYADEVSGGERPFILALPNVWHLASDVTAHLRTGVDGTLPSALELAEAVHPTAAVCGTPTETAGAVIEDLERMDRGLYAGPVGWLDGAGNGEWGIALRGAVQLDGHRARVSAGCGIVAESDPRAELAETWAKLRPMLESLPARGLG

SEQ ID NO: 94095 - protein, 407 aa, Kocuria rosea
  REGION 1..407: note = tr|A0A378GYI2|A0A378GYI2_KOCRO Isochorismate synthase entC OS=Kocuria rosea OX=1275 GN=entC PE=4 SV=1
MLRGTTPPAGTPVPLPRDEAGSGARGLEGDFAFAGRHGILLARRDRELPAGRITDGSVDPVLARLDEVTRAVAGTRAGGEARPVLCGTIPFDPDEPADLFLAERPVWAPRPAPTAPVPLARQLVPAAPAPDPDHHEALAEALDRIGRGAAPHLVLARALDLQLSAPADLDRLWEELVARAAGGHAFLVRPRDGGTVLGAGPELTAEVRPTGFASHPHTGCAARHPTVSGDSAAQQSLLRSPAARRRHQHVVEHQARRLAPLAASLHVPGQPSVPGTDAAWHLATRLTGRLHRGTSALHAAVALHRAAAGAPDWETLSLIRELEPRPRGVFAGLVGWTDAAGHGQWVPVLRSVHLHGTHARLHAAAELDAASTMDGALAETAANFGTVRAALAAAGAPARTGAVPHAA

SEQ ID NO: 94096 - protein, 468 aa, Kocuria sp.
  REGION 1..468: note = tr|A0A495AAC7|A0A495AAC7_9MICC Isochorismate synthase OS=Kocuria sp. 442 OX=2054280 GN=C1C97_005215; PE = 4 SV=1
MTTEFPAPRLSALTLPLSEVPSAADFARDPDVRRLLASEDPATWIMRGRGLVGLGRAASFRVRGGTRFTSARVWWDAVSQDAAVMDRVDRPGTGLVGFGAFAFAPSSTVESGLMVPELVIGTSDDAAWLTLISDGTAAPTPGDVDAAWQRLARLAPTGAGGAGTGRGAAAGAAASSYPTAVPGALDEERWMAAVADGVGMIRAGELDKLVLARDVVVDTGEPIDLGAVLGRLSDRFATCWTYCVRLGAEHDAPGGAGRLLGATPEMLVRVHRGTASARVLAGTLDRQDLPEGANPEDFAVTELGGSEKQQREHRFAVDSLIAGLSPYADEVSGGEHPFILALPNVWHLASDVTARLRAGVDGTLPSALELAEAVHPTAAVCGTPTETAGAVIEDLERMDRGLYAGPVGWLDGAGNGEWGIALRGAVQLDGHTARVSAGCGIVAESDPRAELAETWAKLRPMLESLPAR

SEQ ID NO: 94097 - protein, 470 aa, unidentified
  source 1..470: note = Kocuria tytonicola
  REGION 1..470: note = tr|A0A3L9LB78|A0A3L9LB78_9MICC Isochorismate synthase OS=Kocuria tytonicola OX=2055946 GN=EAE32_03890; PE = 4 SV=1
MTTELPAPTLSALTLPLSDVPSAAGFARDPDVRRLLDGPDPATWIVRGRGLVGLGRAATFRVRGGTRFTAARVWWDAVRQDAAVEDRVRRPGTGLLAFGAFAFAPSSTAASGLVVPELVVGTDDDAAWLTLIVPGATVPTPADVDAAWSRLARVAPGPVAGATPERLDGPAAGGAASSYPTAVPGTLDEGEWMAAVADGVAMIRAGELDKLVLARDVVVDTGRPIELGAVLGRLSERFATCWTYCVRLGDEDSPEEGSGRLLGATPEMLVRVHRGTASARVLAGTLDRQDLPDGANPDDFAITELGGSEKQQREHRFAVESLVAGLSPYADEVSGGERPFILDLPNVWHLASDVTARLRAGVDGTLPSALELAEAVHPTAAVCGTPTETAGAVIEDLERMDRGLYAGPVGWLDGAGNGEWGIALRGAVQLDAHRARVSAGCGIVAESDPRAELAETWAKLRPMLESLPAR

SEQ ID NO: 94098 - protein, 363 aa, Kordia sp.
  REGION 1..363: note = tr|A0A345H5Q7|A0A345H5Q7_9FLAO Isochorismate synthase EntC OS=Kordia sp. SMS9 OX=2282170 GN=entC PE=4; SV = 1
MLDKLSEQLQKQFPFVAYRKPNAAQVQLVLQKDAMLHTVSDFTESGFVFAPFDETKSTILIPFDTVLVGEMEHVAEHEAANASMNPSAEAKKKHIQLVQKGVETIQKSEIQKIVLSRQEAIESSKNPFLIFERLRENYPTAFVYLWYHPKVGMWAGATPETLVSSYGNSIKTMSLAGTRKFQENVAVNWNQKEIEEQQIVTNFIANQLKNMTTNLSVSKATTHQAGSLVHLCSLISGRMTSDTNIGDIVKTLHPTPAICGFPTEAAKAFILQEENYDRTFYTGFLGELNVKEETSRNRNRKNQENSAYRTVRSRSELYVNLRCMQLTDTNKILYVGGGITKDSDPESEWEETLAKSQIMKRVL

SEQ ID NO: 94099 - protein, 432 aa, unidentified
  source 1..432: note = Kosakonia arachidis
  REGION 1..432: note = tr|A0A1I7CVJ1|A0A1I7CVJ1_9ENTR Isochorismate synthase MenF OS=Kosakonia arachidis OX=551989 GN=menF; PE = 3 SV=1
MLSISSALGDLYRRLTERFPRSPGFQFFDVPFPLNDAFDPLAWVASQSVWPQFYWQQRSGDEETAALGALCRFSSLPLAQQFLYPLPEDVRIWGLNAFDPSQGSLFLPRLEWRREGGRAMLRLYLYSDTSLHDDAERAVEFLQALSPFTPLAILKQQPCLVQRHYPERDAWKSLIAQALGTLESAALDKVVLARATDYCYANAVDAASLMAASRRVNYHCFHFMMVFDAHNAFLGSPPERLWRRRGNALRTEALAGTVAGHDDDLQAQRLGAWLMNDDKNQRENMLVVEDICQRLQQQTAALDVLPPQIVRLRNVQHLRRCIWSDLQTPDDALCLQLLQPTAAVAGLPRRAAWDFIQRHEPFAREWYAGSAGYLSRQQSEFCVALRSAKVSGSTVRLYAGAGIVPGSDAEQEWQEIDNKAAGLRSLLELTHA

SEQ ID NO: 94100 - protein, 431 aa, unidentified
  source 1..431: note = Kosakonia cowanii
  REGION 1..431: note = tr|A0A410KBG0|A0A410KBG0_9ENTR Isochorismate synthase MenF OS=Kosakonia cowanii OX=208223 GN=menF PE=3; SV = 1
MFSLSSALGDLHQRLADTFPDTPGFTLFDVPFPLNNAFDPLTWLSAQRVFPQFYWQQRSGDDEAAALGALRTFTSLAEAQQQLQVYPDDVRVWGLNAFEPSESALFLPRLEWRREGGKAMLRLYLYSATSLRDDAQCAADFLNALSSTTPLAMSPARCVEQHHFPTREGWETLISQALETLQRGELDKVVLARATDYRFDAPINAGALMAASRRLNLHCFHFLYRFNDQTAFLGSTPERLWRRRGKALRTEALAGTVANHDDDAQAQQRAAWLMNDDKNQRENMLVVEDICQRLQQQTGALDVLPPQVVRLRKVQHLRRCIWSDLRVADDALCLDLLQPTAAVAGLPRPEARRFIARHEPFAREWYAGSAGYLSRKQSEFCVTLRSAKVSGETVRLYAGAGIVPGSDAAQEWQEIDNKAAGLRSLLLQTHP

SEQ ID NO: 94101 - protein, 432 aa, unidentified
  source 1..432: note = Kosakonia oryzae
  REGION 1..432: note = tr|A0A1T5HGY6|A0A1T5HGY6_9ENTR Isochorismate synthase MenF OS=Kosakonia oryzae OX=497725 GN=menF PE=3; SV = 1
MLSISSALGDLYRCLTDRFPRSPGFCFFDAPFPLNDAFDPLAWLASQPVWPQFYWQQRSGDEETAALGALCHFSSLPLAQQFLHALPEDVRIWGLNAFDPSQGSLFLPRLEWRREGGRAMLRLYLYSETSLHDDAERAAEFLQALSPFTPLANLKQQPCLAQRHYPEREAWKSLIAQALGTLESAELDKVVLARATDYSYANAVNAASLMAASRRVNYHCFHFMMAFDAQNAFLGSSPERLWRRRGHALRTEALAGTVAGHDDDLQAQRLADWLMGDDKNQRENMLVVEDICQRLQQQTAALDVLPPQIVRLRNVQHLRRCIWSDLQTPDDALCLQLLQPTAAVAGLPRRSAWDFIQRNEPFTREWYAGSAGYLSRQQSEFCVALRSAKVSGSTVRLYAGAGIVPGSDAEQEWQEIDNKAAGLRSLLELTHA

SEQ ID NO: 94102 - protein, 426 aa, unidentified
  source 1..426: note = Kosakonia oryzendophytica
  REGION 1..426: note = tr|A0A1C3Z495|A0A1C3Z495_9ENTR Isochorismate synthase MenF OS=Kosakonia oryzendophytica OX=1005665; GN = menF PE=3 SV=1
MYSISSALEHLHNRLADDLPHSPGFCFFDAPFPLNDSFDPLAWLASQPVYPQFYWQQRSGEDEAAALGALRHFASLPLAQQFLQQCPDDVRAWGLNAFNLQQGALFLPRLEWRREGGQAILRLYLLSEHSLHDDAVHAADFLQTLTAFKPLASAQQVCVEQRHVPDREGWETLMAQALRALDKAELDKVVLARATDYAFSNAVHAASLMAASRRLNHHCFHFLFAFDAQQAFLGSSPERLWRRRGTALRTEALAGTVASHDDDQQAQRLADWLMSDDKNQRENMLVVEDICQRLQRETGALEVLPPQVIRLRKVQHLRRCIWTDLQTPDDALCLQLLQPTAAVAGLPRREAWAFIQQHEPFEREWYAGSAGYLSRAQSEFCVALRSAKINGNTVRLYAGAGIVPGSDAEQEWQEIENKAAGLRSLL

SEQ ID NO: 94103 - protein, 432 aa, unidentified
  source 1..432: note = Kosakonia oryziphila
  REGION 1..432: note = tr|A0A1C4EBA2|A0A1C4EBA2_9ENTR Isochorismate synthase MenF OS=Kosakonia oryziphila OX=1005667 GN=menF; PE = 3 SV=1
MLSISSALGDLYRRLTERFPRSPGFHFFDAPFPLNDAFDPLAWLASQSVWPQFYWQQRSGDEETAVLGALCHFSSLPLAQQFLHSLQEDVRIWGLNAFDPSQGALFLPRLEWRREGGRAILRLYLYSETSLYDDAERAAEFLQALSPFTPLASLKQQPCLEQRHYPERDAWKNLIAQALGTLESAALDKVVLARATDYCYANAVDAASLMAASRRVNYHCFHFMMAFDAQNAFLGSSPERLWRRRGNALRTEALAGTVAGHDDDLRAQHLAAWLMSDDKNQRENMLVVEDICQRLQQQTAALDVLPPQIVRLRNVQHLRRCIWSDLQTPDDALCLQLLQPTAAVAGLPRRAAWDFIQCHEPFTREWYAGSAGYLSRQQSEFCVALRSAKVSGSTVRLYAGAGIVPGSDAEQEWQEIDNKAAGLRSLLELTHT

SEQ ID NO: 94104 - protein, 432 aa, unidentified; identical to SEQ ID NO: 94101
  source 1..432: note = Kosakonia radicincitans
  REGION 1..432: note = tr|A0A1V0LBG6|A0A1V0LBG6_9ENTR Isochorismate synthase MenF OS=Kosakonia radicincitans DSM 16656; OX = 1177180 GN=menF PE=3 SV=1

SEQ ID NO: 94105 - protein, 431 aa, unidentified
  source 1..431: note = Kosakonia sp.
  REGION 1..431: note = tr|A0A4R0HV35|A0A4R0HV35_9ENTR Isochorismate synthase MenF OS=Kosakonia sp. WCHEs120001 OX=2529380; GN = menF PE=3 SV=1
MYSISSALSHLHRCLIDDIPRSSGFCFFDAPFPLNDAFDPLTWLASQRVWPQFYWQQRNGDDEAAALGALCRFSSLPLAQQFLQHCAEDVRIWGLNAFDPTQGELFLPRLEWRREGGHAFLRVYIFSETSLHDDAQRALTFLSALVESTPLQNVQQTCLEQHHIPGRDGWRTLIAQALQTLESGELDKVVLARATDYHFASAVDAAALMAASRRLNHHCFHFMMAFNAQAAFLGSTPERLWRRRGSALRTEALAGTVANHEDDQQAQQLADWLMADDKNQRENMLVVEDICQRLQQQTGALEVLPPKVVRLRKVQHLRRCIWTVLQTPDDALCLQMLQPTAAVAGLPRREARAFIQRHEPFQREWYAGSAGYLSRQQSEFCVALRSAKIDGNTVRLYAGAGIVSGSDAEQEWQEIENKAAGLRSLLQLSHA

SEQ ID NO: 94106 - protein, 422 aa, unidentified
  source 1..422: note = Kribbella albertanoniae
  REGION 1..422: note = tr|A0A4R4PNG6|A0A4R4PNG6_9ACTN Isochorismate synthase OS=Kribbella albertanoniae OX=1266829; GN = E1261_27935 PE=4 SV=1
MSLSEPVRSGRVAAPQLVVRSQPVEGVAKQLIDHLPAEGGLSWVRRGDGHIGWGVAARLDVAGGNRFTEAVLWWQELVGAAVVRDEIGVPGSGLVCFGSFGFTDEDPGELVVPEVIVGRRGGTTWVTTISPASLAAPPDLVTHEAHPVYDVTFADGARSGTDWSSIVADAIKRITSGELDKVVLARDLIAIAEQPIDLRWPLRRLAEAYPNCWTFSVDGLIGATPELLVRREKGLITSRVLAGTIRRTGDDAHDLALAASLARSSKDLEEHEFAVRSVADALKPHCKSMNVPETPFVLHLPNVMHLATDVAGVANNGASALGLAAALHPSAAVCGTPTPVARDLIGEIEGMERGRFSGPVGWMDAAGDGEWCIALRCGQADPTDPRRMRLFAGAGIVAGSDPTAELAETNAKLVPMRDALGD

SEQ ID NO: 94107 - protein, 423 aa, Kribbella antibiotica
  REGION 1..423: note = tr|A0A4R4ZFL6|A0A4R4ZFL6_9ACTN Isochorismate synthase OS=Kribbella antibiotica OX=190195 GN=E1263_24310; PE = 4 SV=1
MSLSDPVRSGRVVAPHLVVRSQPVEGVAAQLLDHLPAEGGLSWVRRGDGHIGWGVAARLDVAGGNRFQDAMLWWQELVGAAVVRDEIGVPGSGLVCFGSFGFTDSDPGELVVPEVIVGRRGGTTWVTTISPASSLAGPPDLVTHEASPVHDVTFSDGARSGTDWSSIVADAIKRITAGELDKVVLARDLIAIAEQPIDLRWPLRRLAAAYPNCWTFSVDGLIGATPELLVRREKGLITSRVLAGTIRRTGDDAHDLALAASLARSSKDLEEHEFAVRSVADALKPHCKSMNVPETPFVLHLPNVMHLATDVAGVANNGASALGLAAALHPSAAVCGTPTDVARDLIGEIEGMERGRFSGPVGWMDAAGDGEWCIALRCGQADPHDARRIRLFAGAGIVAGSDPTAELAETNAKLVPMRDALGD

SEQ ID NO: 94108 - protein, 423 aa, unidentified
  source 1..423: note = Kribbella pittospori
  REGION 1..423: note = tr|A0A4R0KLK5|A0A4R0KLK5_9ACTN Isochorismate synthase OS=Kribbella pittospori OX=722689 GN=E0H73_24110; PE = 4 SV=1
MSLSDPVRSGHQPAPHLVIRSQPVDGVSAQLMDHLPTEGGLAWVRRGDGQVGWGVAARLDVAGSNRFQDAVSWWKELVAAAVIRDEVGVPGSGLVCFGSFGFTDQDPSELVVPEVIVGRRGGTTWVTTISPASSLTAPPELVANEPNPVYDVTFSDGARSGTDWSSIVADAVQRITAGELDKVVLARDLIAIAEQPIDLRWPLRRLAAAYPNCWTFSVDGLIGATPELLVRREKGLITSRVLAGTIRRTGDDAHDLALAASLARSSKDLEEHEYAVRSVAEALKPHCKSMQVPETPFVLHLPNVMHLASDVAGVAANGASALGLAAALHPSAAICGTPTPVARNLIGEIEGMQRGRFSGPVGWMDAAGDGEWCIALRCGQADPDNPRRMRLFAGAGIVAGSDPVAELAETNAKLVPMRDALGD

SEQ ID NO: 94109 - protein, 426 aa, unidentified
  source 1..426: note = Kribbella sindirgiensis
  REGION 1..426: note = tr|A0A4R0IZU8|A0A4R0IZU8_9ACTN Isochorismate synthase OS=Kribbella sindirgiensis OX=1124744; GN = E0H50_11045 PE=4 SV=1
MSASPGSRAALATRGPAPQLVVRSQAVDGVSAQLLDHLPDEGGLAWVRRGDGHVGWGVAARLDVAGSNRFQEAMTWWQELTSAAVIRDEVGVPGSGLVCFGSFGFTDQDPGELVVPDVIVGRRGDTTWVTTVSPASSLGAPPELVVHEPSPVYDVAFADGARTGTDWSSIVADAVRRITAGELEKVVLARDLIAIAEQPIDLRWPLHRLATAYPNCWTFSVDGLIGATPELLVRREKGLITSRVLAGTIRRTGDDEHDLALAASLARSSKDLEEHEFAVRSVAEALEPHCTSMNVPETPFVLHLPNVMHLATDVAGVANNGASALGLAAALHPSAAVCGTPTPVARDLIGEIEGMQRGRFSGPVGWMDASGDGEWCIALRCGQADPDEPRRMRLFAGAGIVAGSDPDAELAETNAKLVPMRDALGD

SEQ ID NO: 94110 - protein, 426 aa, unidentified
  source 1..426: note = Kribbella soli
  REGION 1..426: note = tr|A0A4R0HT06|A0A4R0HT06_9ACTN Isochorismate synthase OS=Kribbella soli OX=1124743 GN=E0H45_06760 PE=4; SV = 1
MSASPGSRAALATRGPAPQLVVRSQAVDGVSAQLLDHLPDEGGLAWVRRGDGHVGWGVAARLDVAGGNRFQEAMTWWQELTSAAVVRDEVGVPGSGLVCFGSFGFTDQDPGELVVPDVIVGRRGDTTWVTTISPASSLGAPPELVVHEPSPVYDVTFADGARTGTDWSSIVADAVRRITAGELDKVVLARDLIAIAEQPIDLRWPLHRLATSYPNCWTFSVDGLIGATPELLVRREKGLITSRVLAGTIRRTGDDEHDLALAASLARSSKDLEEHEFAVRSVAEALEPHCTSMNVPETPFVLHLPNVMHLATDVAGVANNGASALGLAAALHPSAAVCGTPTPVARDLIGEIEGMQRGRFSGPVGWLDASGDGEWCIALRCGQADPEEPRRMRLFAGAGIVAGSDPDAELAETNAKLVPMRDALGD

SEQ ID NO: 94111 - protein, 426 aa, Kribbella sp.; identical to SEQ ID NO: 94109
  REGION 1..426: note = tr|A0A4R0JA93|A0A4R0JA93_9ACTN Isochorismate synthase OS=Kribbella sp. YM55 OX=1572660 GN=E0H92_06320; PE = 4 SV=1

SEQ ID NO: 94112 - protein, 474 aa, Kroppenstedtia eburnea
  REGION 1..474: note = tr|A0A1N7L897|A0A1N7L897_9BACL Isochorismate synthase MenF OS=Kroppenstedtia eburnea OX=714067 GN=menF; PE = 3 SV=1
MGGRTVTTMRELHNLAGLKEGAARARREQRPVLVSRTRLVNSLDPLSFFASATGYRGTRNFWSDPDREVTLVGVGAAWKLETHTREDSYLKTGQEWDHLLKGAIRVPAEAPTGTGPLLLGGFSFDPLAGKTPLWEGFFDASFILPQFLLTVTGGECWLTVNVLLHPGEDVEQRGKMLAEQEDELLEAAEDFHLFPPARASFDVVEVEPDRWKKTVATAAREIREGALEKVVLARQLRVQSETSFSPEAGLYRLRERQPHSFLFAVERGEACFLGASPERLVKREGERLYSTCLAGTTRRGEDPEEDRKLGEELLSDPKNEGEHAVVVHMIREAFQQGCSQVRVPDSPTLYRVRDVQHLFTPVEGTPLPETTLLSMVQQLHPTPALGGFPQKEAVARIRETEGMDRGWYSAPVGWLDYRGDGEFACAIRSGLIRGREASLFAGCGIVGDSEPDSEYEETKLKFKPMLSALGGDGR

SEQ ID NO: 94113 - protein, 379 aa, unidentified
  source 1..379: note = Kroppenstedtia sanguinis
  REGION 1..379: note = tr|A0A482TXA2|A0A482TXA2_9BACL Isochorismate synthase OS=Kroppenstedtia sanguinis OX=1380684; GN = D1G38_013965 PE=4 SV=1
MSVSAPRYGDNVSAAPTFLLSGDPGSVRGSGVARAFSDGEAAAAALRDGGCAALVGALPFTPGDPVALWEPAELITDHDPIRPSWPQRRRLRVNAARPEPAEHQRRVAELVSRIRAGEAGKVVLARALEMSLEEDVDPLALAAAFAHGNAAHNAFAVALDAAGGSHAGQWLVGASPELLVRRRGPEVFCRPYAGTMARSDNPAVDKERAEALRGSAKDLAEHAFVVDYLRERLAPFCTELDMPAEPVLLSTGELWHLATPIRARLKDPATTSLDLALALSPTPALCGTPSDVAAAMIEQYERDRGFYGGAVGWSNADGDGDWVVAIRCVLLDADRRRVTAWAGGGIVADSDPAAELAETTAKFGTALRALGADPAVADR

SEQ ID NO: 94114 - protein, 492 aa, unidentified
  source 1..492: note = Ktedonobacterales bacterium
  REGION 1..492: note = tr|A0A4P6JRK0|A0A4P6JRK0_9CHLR Isochorismate synthase OS=Ktedonobacterales bacterium SCAWS-G2; OX = 2509675 GN=EPA93_16180 PE=4 SV=1
MDIVFIDTPDTSDITGLESVVRHREQLLSTLLQASHKASSLHQNVLASLTLPIAAEDPLLIFKTFKQGSADEIFFWAHPEEQSAFVGVGAAITIEATGLTRCASAAAQWHAIQEHAVITASSIHLGGPMLFGGFSFDPLLPSQQLWQDFPDALLILPLLHYHYSGTRAALTINQPVNEGDDIARLADEISARIRSLHEAIEAENGAGTVQDKASLQLSIQNLLPESAWKSKVADAVKMIQSGAFEKVVLARGVRVVNTAEEAFDIGAVLPQLYKTYPSAHIFAFQRGQRTFVGATPEPLIEAHNKQLRTMPLAGSAPRGETEAEDRRLGTELLHSAKNKVEHEIVVVTIQKVLASLCSTVRVEDTPHLLRLKNIQHLATTIVGDLLPGHSLLEALQDLAPTPAVGGFPRKPALEFIRKQEGLERGWYSGSIGWLDMQGNGEFALALRSALIEGNQAILFAGGGIVADSHPESEYSETCWKLQVMLRGLRGKD

SEQ ID NO: 94115 - protein, 462 aa, Kurthia sp.
  REGION 1..462: note = tr|A0A0X1RXT6|A0A0X1RXT6_9BACL Isochorismate synthase family protein OS=Kurthia sp. 11kri321 OX=1750719; GN = ASO14_769 PE=4 SV=1
MNRKLSTINGDLSKTDQSTVHFYIESKELETQSTLIFFEIGEEKFKGQCFYWQNKDKDFTLVGLGHAYTIKSNDADARYEDVEKAWKHLIHSTSLKGIKQQPILFGSFTFDPKKGVSDEWANFSHANFALAKHQLVESNGRFYMNTHLVSEEVITNEDIELAREEREALLEQAKGRTLKTYIKPHVVLTEEPYKEEYLQSITQVTNQIKAKQADKVVIARSLALTFDEEVNTSNLLAQLSEEQPESYLFAQEQGQDLFLGATPERLVFVNHKKAYSSCVAGSIRRGATVQEDEEFGRILLNDTKNLQEHQYVVDMISNSFKETCEQYTLPNHPDLLKIRDIQHLHTPIEGILKEDATILQMVEKLHPTPALGGSPREVAMEMIRQYEPMNRGVYAAPIGWLNADGDGEFAVAIRSALLQDKKAYLYAGGGIVEDSEPQSEYEETLVKFRPMLRTLGGKLNDE

SEQ ID NO: 94116 - protein, 462 aa, Kurthia zopfii
  REGION 1..462: note = tr|A0A3S4VRM7|A0A3S4VRM7_9BACL Isochorismate synthase entC OS=Kurthia zopfii OX=1650 GN=entC PE=4 SV=1
MNHKLSTTNDDLKNTDQSTVRFYIETLEIDRLSALPFFEAGEKSFEGMRYFWQNREKNFTLVGLGNAYTIESNEENQRYTNVENQWKQLLQGVDYENLLQQPILFGSFTFDPKKGVSDEWSNFSHANFALATHQLVIRNEKAYVNTHIVSKQNISEEQISKLLAERDEIIHQAQVKGSKTYAKPVVNRMTEPFKEEYLKSISNVTDAIKDGQADKVVIARSLALRFDEKVDPTNVLTQVYNEQPESYLFGQENGENLFFGASPERLVSVKDGQAYSSCIAGSIKRGATKEHDNALGAELLNDEKNLQEHQYVVDMITSSFEDTCSSYTVPESPQLLKIRDIQHLYTPVEGYLNDGATILQMVEKLHPTPALGGAPRGKAMEMIRQYEPMNRGIYAGPIGWLNAEGDGEFAVAIRSALLQKDQAYLYAGGGIVADSEPQSEYEETLVKFRPMLRALGGKLNDE

SEQ ID NO: 94117 - protein, 402 aa, unidentified
  source 1..402: note = Kushneria phyllosphaerae
  REGION 1..402: note = tr|A0A2R8CJN1|A0A2R8CJN1_9GAMM Isochorismate synthase DhbC OS=Kushneria phyllosphaerae OX=2100822; GN = dhbC PE=4 SV=1
MNQPLPSRFPLDQAPWGLLEGLKPGDAFFSSPATTLLGRGTAHARHTPDARPETLDAAARELFDTARAQGHPDPVIMGLIPFNHADSARLFVPRELLRAAPGTFEQCPASAPLETRALAITPEPSPEHYCQAVDSALTLFETTALNKVVLARSLRADTQAPVDAQALLKRLLSINPRGYNFALPAGDTESLVGASPELLIRRVGNRIIANPLAGSVPRHSDPQEDQRRAEGLYVSDKDLREHALVVEAIVTALRPLCRTLEVPEGPEVIATDRMWHLSTTIEGELADPTMTSLSVAAALHPTPAVCGAPWQDAHQAIASFEGFERGYFTGLVGWCDATGDGEWAIAIRCAELAPDHVRVFAGAGVVPGSSPQGELEETAAKMRTMLDAMGLDYEDDATNVTA

SEQ ID NO: 94118 - protein, 374 aa, unidentified
  source 1..374: note = Labedella endophytica
  REGION 1..374: note = tr|A0A433JXC0|A0A433JXC0_9MICO Isochorismate synthase OS=Labedella endophytica OX=1523160; GN = ELQ94_02095 PE=4 SV=1
MVGIGEVLRLEFTGPDRMREAAAFWRRIAEAATVSDAVGVPGSGLVAFGTFAFSGVSGMPSTLIVPRTIVGRRGSHTFVTRIRRADEPDDAARLVPSRRFGDEFRISLGAGAETADGFVHHVEQAVERIAHGDLSKVVLARELTGRIPQGADLRRVLTDLALGYPDCWTFSVDGLVGSSPETLVRVEDRTVGARVLAGTASRGTNADTDQKAALALVTSSKDQDEHQFAVRSAVETLTPFTRHLSTSEVPFALKLPNLWHLATDLEGGLAGDASSIDLIDAMHPTAAVAGAPRAEAVELIAELEPFDRGRYAGPVGWVDAAGDGEWAIALRCAQVAPSGTVTAYAGCGIVLDSDPAAELAETRMKFRPIVEAFG

SEQ ID NO: 94119 - protein, 461 aa, unidentified
  source 1..461: note = Labedella phragmitis
  REGION 1..461: note = tr|A0A444PSZ9|A0A444PSZ9_9MICO Isochorismate synthase OS=Labedella phragmitis OX=2498849 GN=ELQ90_09240; PE = 4 SV=1
MLRTSGTSSSPRARASTVRATTDRSHDALLVPGPGPAPPTGLRLESVISTGTTPALVASTKRADVVGPLLAHADAQRPLVWSRRGDGLVGIGEVLRLEFSGPERMRDAAAAWREVASAATVTDGVQVSGSGLVAFGTFAFSAESEARSVLIVPRTIVGRHGSTTFVTRIRRADEPDDDARLTASRRFGDEFRISLSAGEETADGYIDHVGQAIDRIASGALSKVVLARELSGHVPAGADLRRVITDLALGYPDCWTFAVDGLIGSSPETLVRVEAGTVGARVLAGTASRGVNAEADQKAALALVTSTKDQDEHQFAVRSAVESLRPHTRHLATSEVPFALKLPNLWHLATDLEGAIDGGASSIDLIDAMHPTAAVAGSPREEAVALIAELEPFDRGRYSGPVGWVDASGDGEWAIALRCAQVDEDGDVTAYAGCGIVVDSDPAAELAETRMKFRPIVDAFG

SEQ ID NO: 94120 - protein, 414 aa, unidentified
  source 1..414: note = Labedella populi
  REGION 1..414: note = tr|A0A444Q718|A0A444Q718_9MICO Isochorismate synthase OS=Labedella populi OX=2498850 GN=ELQ92_12615; PE = 4 SV=1
MSTGTPPALVASTRRVDGIGPLLAHADAQRPLVWSRRGDGLVGIGEALRLEFRGADRMREAAAAWRDVAAAATVTDGVRVSGSGLVAFGTFAFSADSQEPSVLIVPRTIVGRHGSTTFVTRIRRADEPDDDSRLTASRRFGDEFRISLSAGEETADGYVEHVGHAIDRIASGALSKVVLARELTGHVPAGADLRRVITDLALGYPDCWTFAVDGLIGSSPETLVRVEAGTVGARVLAGTASRGVNADADQKAALALVTSTKDQDEHQFAVRSAVESLRPHTRHLATSEVPFALKLPNLWHLATDLEGALDGGASSIDLIDAMHPTAAVAGSPREEAVSLIAELEPFDRGRYSGPVGWVDASGDGEWAIALRCAQVDPDGDVTAYAGCGIVIDSDPAAELAETRMKFRPIVDAFG

SEQ ID NO: 94121 - protein, 393 aa, Labrenzia aggregata
  REGION 1..393: note = tr|A0A0M6Y998|A0A0M6Y998_9RHOB Isochorismate synthase EntC OS=Labrenzia aggregata OX=187304 GN=entC; PE = 4 SV=1
MATGARVMRHEDVAIQPDPKRKFLFTSGGNELHADGIRERIAVPARTGKTSGDLFQATVGAALERARNAGQENPIVVGAIPFDLGEVSCLYVPERHEWRTCKGPNGGAVSKRIMPELLAQRSYPDEAGFKRAVQHAIVNFQHSDVRKAVLSVIRELQFAEPVDVERLMTSLRAQNTDGYQFQVPLPDGSELIGVSPELLIRKSGRSFTSNPLAGSTRRLPELAADKDAGTELLRSEKDRYEHRLVVEDIHRLLQPYCSQIDVPDQPSLLGTAALWHLSTRIEGQLNDPSMTVLQLACLLHPTPAVCGYPTELAHRLIRFVEPFERGLFTGIVGWCDAEGNGEWAITIRCGIVERDVVRLFAGAGIVEASQPDCEWAEVQTKLGTMLKACGLAA

SEQ ID NO: 94122 - protein, 392 aa, Labrys neptuniae
  REGION 1..392: note = tr|A0A5C1W983|A0A5C1W983_9RHIZ Isochorismate synthase OS=Labrys neptuniae OX=376174 GN=FZC33_04535 PE=4; SV = 1
MRAGAIAMYSDGKTISSTDGSNLLFSTGSRELRAFGQHLPISTPARGGEDWGSQFQRSVRQALDEARAGGQDNPIVMGAIPFDMREPSCLYVPQAYEWRERQAPRAPDGADRLPALLDQRSIPDEPGFKKAVEQAILNFRHGDIRKVVLSVMRELRFAGSVDVDSLLDSLAVQNSSGYQFRVPLPDGGELIGVSPELLLQKEGDRFVSNPLAGSARRQPFPEADQATADALLQSPKDLYEHRVVIDDIRRVLEPHCAELVIPTSPSVISTAALWHLSTRLHGRLSDPQTSALQLACRLHPTPAVCGTPTEQAHKLIRFVEPFERGLFTGMVGWCDSKGDGEWVVTLRCGIVDREIVRLFAGAGIVEASQPEAEWAETQTKLKTMLNACGLAA

SEQ ID NO: 94123 - protein, 445 aa, Lactobacillus antri
  REGION 1..445: note = tr|C8P8M8|C8P8M8_9LACO Isochorismate synthase; OS = Lactobacillus antri DSM 16041 OX=525309 GN=menF PE=4; SV = 1
MIQLLNQVITKPYALYSYRISADLAQLCRQNQGYFNQQVFWQAADGKRTYWGIQPQRFLVGQSSAAIKKFQRAFSQQWQNLTPAFSCQPVLLGGFPFDSRGKRAPFWQQLEQGYFILPQILFMQDKERTTVSLLVPTNQEVRPQLVTLVDQVDQILARQIGPQPVPAVHGEELAVNEWLQLVNQSVTAIMDHRLKKVVLARQLRLTADAPFNAAEILQRLICQQENTYHFLVQAGNRTFVGASPERLLKADARNFTTASVAGSIRRGKTPGEDEQLGQQLLTDHKNNHEHQLVVERIQQVLAEYATAVTVGQQRLLKNRDIQHIYHPISGRRKPGGAMLDLLAALHPTPALGGEPRQAALAWLAAREPAGRGMYGGPVGWLGLGADEGEFAVGLRSGVFSQQAGLLYAGCGIVAGSVAAKERRETGLKFQPMLRGVSDQWIINKH

SEQ ID NO: 94124 - protein, 432 aa, unidentified
  source 1..432: note = Lactobacillus bombi
  REGION 1..432: note = tr|A0A347STA9|A0A347STA9_9LACO Isochorismate synthase OS=Lactobacillus bombi OX=1303590 GN=DS830_07155; PE = 4 SV=1
MSAALFIKTKTIDSLNLPQAMAWLQNQAGPNFAWENPTQDHLMIASGQILEVFSQQAVNFNDLNNLLQQAQQQLGDLSAKELSHLKVVGGFPFNIHQLGAEVWQNLKGGRLWIPHILIERRQNTNYLTLIESNPHQINSHWDKVFHQIQTTSPLKAQRYSLTDVQELALLQYQNSLKIALQKIATGSLKKVVVGRFAVGNLTAVQPAAVWLQLRDSQPDVYHILIQDQQTAFLSATPERLLATKKQHFQTAAVAGTIRRDSNPIIDQQLQQDLLHDYKNLQEQDLVVQWIKTALQKLHLQVSAPMTPQIIQTATVQHLYTPIQADGFANPAQVLAQLHPTPALGGLPKAAALNFLKNHESESRGMFGAPIGYLDANNQGEFAVGIRSCLLTPNQIRLFAGSGIINGSEINTETQETYNKLQAMLSAFQIEDR

SEQ ID NO: 94125 - protein, 449 aa, Lactobacillus coryniformis
  REGION 1..449: note = tr|A0A5B8TIY5|A0A5B8TIY5_9LACO Isochorismate synthase OS=Lactobacillus coryniformis OX=1610; GN = FGL77_01330 PE=4 SV=1
MVAHNKTRNQSEKSEKVLQARKTKVTWSAAQWQQYESRGVQLDQYAVFENTDQTVAWYGFGAVATYTPSSPAAFTAVAAWVKQLRQQLASTVSSQDIAILGGFAFSTPGATQHNGWGALANGYFMLPRFLVKRSGGQTELIELSAAAFASADLLADFEQFLPAIVQPGVEVDLLQQVEDAASWQQAVQQVVTRLQTDAYLQKVVLARTLMVTAAQPFSVTQLLLALRQVHTQVYHLVLKVADQLFISATPERLVAVQGQHLATAAVAGTTARGVDAATDAALGAALLKDQKNRAEQQIVVTAIQQRLQNLTTELVLPARPQLLKSQQVQHLYTPITAKLQPAADLFTAVAALHPTPALGGQPAALALPLIQQLEPEYRGLFGAPFGYATLAGDGEFAVAIRSMLVQQQQAFLFAGAGIVAASKPAAEVRETTLKFQPMLQLLRGVDHAK

SEQ ID NO: 94126 - protein, 426 aa, Lactobacillus rennini
  REGION 1..426: note = tr|A0A1K2I530|A0A1K2I530_9LACO Isochorismate synthase @   Menaquinone-specific isochorismate synthase; OS = Lactoba  cillus rennini OX=238013 GN=LREN565_0556 PE=4; SV = 1
MLQVRTQTISLSSAQWQTLEKQALALSHYIVFESADQTSAWYGFGATAICKPANNAAGYQKVANWLAGLHQQMINSINPEMLAILGSFSFMKIGKQHNDWQKLTNGYFILPRFLIKKTAQKTDLIETTEQQFATADIVQDFKQYLPQTKVANNRDKLSYYADAKTWQRHVAEIVQQIQGRSTLEKVVLARTLQVNNEMDFDYAKILTRLRQKQLAVYHLVLKVDHQLFVSATPERLVKLTAGVLQTAAVAGTAPRGVEKYQDQALGTALLQDKKNRSEQQIVVAEIKRRLTPLTTHLEIPDEPILLKSQRVQHLYTPIRAHLAANENIFTLIAALHPTPALGGYPKEAALTLIRRWEPDFRGLFGAPFGYVTFAGTGEFAVAIRSMLIHGQRAKLFAGAGIVAASDPKQEVQETSLKFEPMLTLLQ

SEQ ID NO: 94127 - protein, 449 aa, Lactobacillus sp.; identical to SEQ ID NO: 94125
  REGION 1..449: note = tr|A0A3R8GGD7|A0A3R8GGD7_9LACO Isochorismate synthase OS=Lactobacillus sp. OX=1591 GN=DUD28_07310 PE=4; SV = 1

SEQ ID NO: 94128 - protein, 378 aa, Lactococcus garvieae
  REGION 1..378: note = tr|K2PVV3|K2PVV3_9LACT Menaquinone-specific isochorismate synthase OS=Lactococcus garvieae DCC43; OX = 1231377 GN=C426_1138 PE=4 SV=1
MNYRRKNLNLKHPLAFWSAFPDPSERFFWYDSQKQTLIIASERLTTLQEEDIEKYPYVFYSQSFFNEVEGELWQDFGNELVAFKHYFVQTPTESYVLTCDNLPDMKDEEIKENKNTYKEEPDDYPSWQELYNKLQESITSGKTVKIVASREIKFTASRAFEIEAIIKRLMQNNPGAFVFAYHKAGKTFLGASPEILVQKEGDEILSYALAGTMPRTVKHAAELLLKDPKNRHEHQIVVQKIKEKMLEKSSDVSIGETSTMALKNIYHLRTLLTTTDKQHSIIDWSKHLHPTPALGGEPSQPALSFLRENEKHERGLYAAPLGLIDKHGNGTLIVAIRSALFMENTCYAYAGCGIVADSDCRSEFDETKIKLKTILEAL

SEQ ID NO: 94129 - protein, 391 aa, Lactococcus lactis
  REGION 1..391: note = tr|A0A2N5WEQ8|A0A2N5WEQ8_LACLL Isochorismate synthase MenF OS=Lactococcus lactis subsp. lactis OX=1360; GN = menF PE=4 SV=2
MLSYVIIFMVEKMNYIKINLKLNNPLAFWANFSESERFFWFDPQKETFVIGCERLKAIDLEHDKFSDYPYLFHSQTFFDDIKGELWENFGGETIAFKHYFVVNKENSYTLTCDSPREISEITIPKFKHQLTEKASDFSAWQELFYAIQKNFADGKSRKIVASRELEFTSQTSFELESIIQNLLDNNPNAFIFAYQKGKRIFLGASPEILVQKENDQLLSYALAGTFPKTMENAGQKLLTDPKNLLEHDIVVQKIKRNLLEKAETVTVGTTELMELKNVYHLRTILSAKNSELSLIDWTKQLHPTPALGGEPRHEALEFLRKHENHERGLYAAPLGLIDSKGNGTMIVGIRSALIVDKKLYAYAGCGIIPSSDALEEFRETKVKLKTILEAL

SEQ ID NO: 94130 - protein, 378 aa, Lactococcus sp.
  REGION 1..378: note = tr|A0A139MIU6|A0A139MIU6_9LACT Isochorismate synthase / Menaquinone-specific isochorismate synthase; OS = Lactococcus sp. DD01 OX=1776443 GN=LACDD01_00042 PE=4; SV = 1
MNYRRINLKLEHPLAFWSAFPDPSERFFWYDSQKQTLIIASQRLQAVQEQDIANYPYVFYSQSFFDEVNDELWQDFGNEIVAFKHYFVQTPTESYVLSCDSLPEITDEKGSKLSNSYTEEASDYQEWQSLYQKLQENIAHGKTIKIVASRQIKFTSEQTFKIEPILERLIENNPSAFIFAYHKAGKTFLGASPEILVQKEGNHILSYALAGTVPRSLAHGDTRLLQDPKNLHEHQIVVQKIKDKMLEKSPHVQIGKTGIMALKNVFHLRTLLSTVDTSHSLIDWAKHLHPTPALGGQPSKAALDFLRANEKHERGLYAAPLGLIDAQGDGTLIVAIRSALFDGKTCYAYAGCGIVAASDCQAEFDETKIKLKTILEAL

SEQ ID NO: 94131 - protein, 474 aa, unidentified
  source 1..474: note = Lacunisphaera limnophila
  REGION 1..474: note = tr|A0A1D8AWV8|A0A1D8AWV8_9BACT Salicylate biosynthesis isochorismate synthase OS=Lacunisphaera limnophila OX=1838286 GN=pchA PE=4 SV=1
MKTPPVNPTGSATPEALRGFLAQCAAEARSVGRPQLVSISMAVDNLDPLAVLESIFEPGEPHFYAERPAAGFGVAGAEVAVEFNAAGADRFAAARAFIDRTLADTIAVGPLAEPFAGPHFFFAAGFADDAPAGGAFPALRVQVPRWQVARRGDGTIAVANVLLPGDAPVDLVTAKIWRAHGKFGAFDYSRAKQKARPSAPQRAEEIGGAEAYPMAVRQALAEIARGDYQKVVLARALRYTTAEEFHPMGVLNHLRQRYPECYSFSIANGRGQSFIGASPERLVRVAGGRMHTAALAGSAPRGETASEDAAWAQALLQSEKDLREHRLVLDSIVGRLAGLDLKLEHAAQPRLLGLANVHHLHTPISASLPAGVDILDLVARLHPTPAVGGAPQAPALAALQRLEAFPRGLYAGPQGWVDHQGGGEFFVGIRSALIDGRTATAYAGAGIVAGSEPEKEFAETDLKFNALIGALTQS

SEQ ID NO: 94132 - protein, 498 aa, unidentified
  source 1..498: note = Lacunisphaera sp.
  REGION 1..498: note = tr|A0A4Q1CC79|A0A4Q1CC79_9BACT Isochorismate synthase OS=Lacunisphaera sp. TWA-58 OX=2508720; GN = ESB00_12845 PE=4 SV=1
MTRLTDQCRTCHSERSEKSRAISRMKTPPVNPTGSATPEALGAFFAQCAAEARTAGRPQLVSISVVVDNLDPLAVLESIFEPGEPHFYAERPAQGFGVAGAEVAVEFTAQGARRFADAKAFIAATLANTIAVGPLAEPFAGPHFFFAAGFADEAAPGAAFPSLRLFVPRWQVARMGDSTVAVANVLVAADAPLEMLTARIWRAHAKFGAFDYSRAKQKDRPSAPRMAEEIGGSGSYQRAVAQALTEIARGDYQKVVLARALRYTTTEEFHPMGVLNHLRQRYPDCYSFSIANGKGQSFIGASPERLVRVAGGRMHTAALAGSAPRGQSASEDAAFAQGLLHSEKDLREHRLVLDSIAGRLADLGLQLEHATQPRLLGLANVHHLHTPVSASLPAEAHILDLVARLHPTPAVGGAPQEPALAAMRRLETFPRGLYAGPQGWVDHRGGGEFFVGLRSALIDGRTATAYAGAGIVAGSEPEKEFAETELKFKALLEALTQS

SEQ ID NO: 94133 - protein, 395 aa, unidentified
  source 1..395: note = Lampropedia puyangensis
  REGION 1..395: note = tr|A0A4S8FD20|A0A4S8FD20_9BURK Isochorismate synthase OS=Lampropedia puyangensis OX=1330072; GN = E9531_01185 PE=4 SV=1
MTISATSPSQSSPDWLLNQLSHRDIFFASAQHQLRSHNHAEDLHAYAPITSASVNALFAQARSRGQTTPTLFGLIPFDTQLPASLTLPLHVQHTLSPNDALTIGANSAQVSPSVLSKTPVPAPEVYGQMVERALELFAQGDVKKIVLARAMDIALDGAIDPEHIMRDLLTRNRHGYTFNLPIWAEDAQSQASMMGASPELLVRREGEMVYINPLAGSIPRHSDPVIDQQRHEGLAASEKDLREHGYVVSDIARILAEHCTELDVPETPSVIGTDALWHLSTFITARLKSPQMSALDLGLALHPTPAMCGYPTAQAFASIQALEPFAREYFAGLVGWQKENGDGEWALTIRCGRYDGQRSFRLYAGAGTVAGSDPVSEIRETETKMATFLRAITKS

SEQ ID NO: 94134 - protein, 397 aa, Lampropedia sp.
  REGION 1..397: note = tr|A0A4S5BS55|A0A4S5BS55_9BURK Isochorismate synthase OS=Lampropedia sp. YIM MLB12 OX=2562762; GN = E8K88_03365 PE=4 SV=1
MSTATSPDLPASNEWLLDAFANRDAFFASPAHQLRSQHGSADLHAYAPISASLVEQLFAQANAQGQHNAVLFGLIPFDVTQAASLTIPQKVQHVASPANANAITPTPSTANTASPAVTSKQPVPAPELYGQMVEQALDLFAQGDVKKIVLARAMDVTLSGTIDQAHILRDLLARNRHGYTFSLPIWNDGAASQAAMMGASPELLVRREGDMVFINPLAGSIPRHSDPALDQERKDGLAVSEKDLREHGYVVSDITRILAEHCTDLQIPERPSVIGTDALWHLSTFITARLKNPAMTALDLGLALHPTPAMCGFPTASAFAHIQALEPFERDYFAGLVGWQKENGDGEWALTIRCGQYDGKQVFRLYAGAGTVAGSDPASEIRETETKMATFLRAIAK

SEQ ID NO: 94135 - protein, 411 aa, unidentified
  source 1..411: note = Larkinella knui
  REGION 1..411: note = tr|A0A3P1CL95|A0A3P1CL95_9BACT Isochorismate synthase OS=Larkinella knui OX=2025310 GN=EHT87_17385 PE=4; SV = 1
MQFLTHLSSTVQTQQTSHSVWQAAVQAGYPAALWRLPNRTDRELIIDSSGSVSTVVMDLEELPMGFAVSPFINPETENTLFLKADFYWRFDENGNILASQNQLATDHPAFDSLFKNNPKTVKNNLAPTVNIVQATDNQQQQFEETVGRAIRQMERGKFRKVVLSRTKTIRFEEQPAIPTLFNRLCAAYPNAFVSAVYLPDRNQIWIGATPERLVSVDAGGIFRTVALAGTQSAFDGEGRPKRTADAPWTQKEIEEQALVSRYIIGCFKKIRVREYIEEGPKTVIAGNLMHLRSDYSVDTQAVNFPQLGTVMLRLLHPTSAVCGMPREAAQEFILTNETHQRELYSGFLGPVNIYRTEGPETHLFVNLRCMKLEGQEGTLYAGAGLTEDSSPAKEWRETELKCDTMLAIVKS

SEQ ID NO: 94136 - protein, 411 aa, Larkinella sp.
  REGION 1..411: note = tr|A0A368JFT7|A0A368JFT7_9BACT Isochorismate synthase OS=Larkinella sp. ZZJ9 OX=2315727 GN=DUE52_25995; PE = 4 SV=1
MQFSTHLSSTVQTQQTSHSIWQGAVQAGYPAALWRLPNRTDRELIIDASGNVATVAMDFEELPMGFAVSPFVNPDAESTFFLKADFYWRFDENGTILAAQNKLPTDHPAFESLFRTDSKTAGKETISVVKVDKSTQNQQLDFEETVSRAIRQMERGTFRKVVLSRTKAIRFEEQPDIPTLFNRLCQAYPNAFVSAVYLPDRNQVWIGATPERLVSVDADGIFRTVALAGTQSAFDSEGRQKRPADAPWTQKEIEEQALVSRYIIGCFKKIRVREYIEEGPRTVVAGNLMHLRSDYSVDTQAVNFPQLGTVMLRLLHPTSAVCGMPRETAQDFILQHEAHAREFYSGFLGPVNIARQEGPETDLFVNLRCMKLEGQEGTLYAGAGLTEDSSPAKEWRETELKCDTMLSVLTK

SEQ ID NO: 94137 - protein, 395 aa, Lautropia mirabilis
  REGION 1..395: note = tr|E7RUE5|E7RUE5_9BURK Isochorismate synthase; OS = Lautropia mirabilis ATCC 51599 OX=887898; GN = HMPREF0551_0111 PE=4 SV=1
MTTSTSSTQAMPVRAEFIFSSGSRELHAHGVRETITVPAVNGDAADSPLQQQVRAAFDRARKAGMENPVVVGAIPFDVNQPSQLYVPETAAWQEADPSTHAQAMPMPALRSMDTVPDQHGFQQGVANAIAAFPAEGIHKVVLSITSRLHFTEAVPVAALRTNLRRLNPSGYLFQVPLPGNIHLVGVSPELLIEKHGATVQSNPLAGSARRQADPAEDQATAERLAASGKDHHEHQFVTADIQARLAPLCTALDVPARPSLINTAALWHLSTRIRGELQDPQTNALQLACCIHPTPAVCGTPRDAAHALIRRIEPYDRGLFTGIVGWMDAQGNGEWVVTIRCGVLHDKWLQIYAGAGIVDASDPQSEWNEVQTKQGTMLRACGLGEEQAAPIPTAA

SEQ ID NO: 94138 - protein, 390 aa, Lautropia sp.
  REGION 1..390: note = tr|A0A3R8NAX1|A0A3R8NAX1_9BURK Isochorismate synthase OS=Lautropia sp. KCOM 2505 OX=2490857; GN = EHV23_13870 PE=4 SV=1
MFSARDDLDNPFARHGHSMPADAAFLFSHGPHTLRTAGVQEVIQTPADGSASPDGPLQQHIREAFGRARSAGIARPIVVGAVPFDVHQPSCLFVPQQAEWLSSWDTPVVSSMPGLKSLVTQPDQAGFEAGVARAAAACAAHAPAKAVLAITSRLTFTAPPFVEALRSRLRQQNPSGYLLQVPLPDGGYLVGVSPELLIRRHEYTVQSNPLAGSARRLPDPEADRIHADRLSASSKDHHEHRFVTDDIRARLSPLCATLQVPEAPSLISTAALWHLSTQIHGTLQDPPANALQLACAIHPTPAVCGTPRDAANALIRSIEPFDRGLFTGFTGWMDADGNGEWVITIRSGVLHGEHLQIYAGAGIVAESDPHSEWNEVQTKQRTMLHACGIS

SEQ ID NO: 94139 - protein, 431 aa, Leclercia adecarboxylata
  REGION 1..431: note = tr|A0A5B7XFV2|A0A5B7XFV2_9ENTR Isochorismate synthase MenF OS=Leclercia adecarboxylata OX=83655 GN=menF; PE = 3 SV=1
MHSISTALEGLCHQLAADFPEAPGLHCLDVSFPLNDAFDPLGWLNAQQLYPQFYWQQRNGDEEYAALGAIKHFPSLSAARQFLHLYPHAPDLRVVGVNAFDPAQGSLFLPRLLWQRFGGTATLRLVLWSDTSLKTEAIRAREFVRSLAESQPVAPVTQTVVSETHQPDKAGWLQLITRATDAIARGEFDKVVLARATDLQFNQPVNPAALMAASRQVNFQCYHFLMRSDASQAFLGSSPERLWRRRAMLLRTEALAGTVASHPDDARAARLGNWLMNDDKNQRENMLVVEDICQRLQRDNGVLDVLPPQIVRLRKVQHLRRCIWTTLQQPDDEQCLLRLQPTAAVAGLPRQAAWEFIARNEPFDREWYAGSAGYLSLAQSEFCVALRSARVQENAVRLYAGAGIVSGSDPEQEWQEIENKAAGLRTLLLKD

SEQ ID NO: 94140 - protein, 431 aa, Leclercia sp.
  REGION 1..431: note = tr|A0A345C7Z8|A0A345C7Z8_9ENTR Isochorismate synthase MenF OS=Leclercia sp. W17 OX=2282309 GN=menF PE=3; SV = 1
MHSISTALKGLCQQLADDFPDTPGLHYLDVSFALNDAFDPLGWLNAQHIYPQFYWQQRNGDEEYAALGAITHFPSLSAARQFLNRYSHAPDLRVVGVNAFDPRQGNLFLPRLLWQRFGGTASLRLVLWSDTSLKAEVQRAREFMQTLAESQPVAPVTQAVVRETHLPDRAGWLQLITRATEAISRGEFDKVVLARATDLQFNEAVNPAALMAASRQVNFQCYHFFMRTDASRAFLGSSPERLWRRRGLLLRTEALAGTVASHPDDAHAARLGNWLMNDDKNQRENMLVVEDICQRLQRENGVLDVLPPQIVRLRKVQHLRRCIWTALQQPDDEQCLLRLQPTAAVAGLPRQAAWDFIAHNEPFDREWYAGSAGYLSLAQSEFCVALRSASVEESCVRLYAGAGIVSGSDPDQEWQEIENKAAGLRSLLLKD

SEQ ID NO: 94141 - protein, 421 aa, unidentified
  source 1..421: note = Leifsonia flava
  REGION 1..421: note = tr|A0A4Y9R2T1|A0A4Y9R2T1_9MICO Isochorismate synthase OS=Leifsonia flava OX=2561933 GN=E4M00_08215 PE=4; SV = 1
MVTATESRVRALRIETTPVDGIRSLLFFAEQRSPLLWMRRGEGFAGAGEALRLEFSGPTRFTDAAAAWAEVAGLAQVHDSVGLPGTGLVAFGTFGFADDSSATSVLIVPEIIVGRRGSHSWVTRVSAVDAADGSDASARADDPVATAFGDDYRVTFRPGELPPAAFMEAVASAVRHISASDARKVVLARDLVGTVPSGSDLRRVLAELALGYPDCWTFSVDGMLGSSPETLVRSEAGTVSARVLAGTAPRGRDAVTDENVAASLSRSQKDLAEHGFAVQSVLATLGPHTTRLQNSQPFTLQLPNLWHLATDVEGVLHDGSTSLDLVAAMHPTAAVAGTPTDAALTIIRELEPFDRGRYAGPVGWIDAHGDGEWAIALRCAQVDADDSVRAYAGCGIVADSVPAEELAESRIKFRPIVEVFA

SEQ ID NO: 94142 - protein, 417 aa, Leifsonia rubra
  REGION 1..417: note = tr|S7XM81|S7XM81_9MICO Isochorismate synthase; OS = Leifsonia rubra CMS 76R OX=1348338 GN=ADILRU_0478 PE=4; SV = 1
MTNQREPLTIVTRPSGDIDRILDWITPDHPLAFVRNGEGIVGVGELLRREFRGADRFAAAAAAWSELTRTAIVHDSVNRAGTGLIAFGSFAFADSSSSVSVLIIPRVIVGNREGSHWVTTISAGEANTMPETTDALATLHRHPHGAAVHVSFAPGDMSTTAFTTAVTAALHEIALSRAEKLVIARDQVAMLPTGADLRVPIAALATRYPDTFTFAVDGLIGSSPETLVNVHNGTVSARVLAGSAARGDNHSSDEQAAATLTGSLKDQQEHALALASVMDALRPLSLELHAASSPFALQLPNLWHLATDIEGQLAGRSSALDLIGILHPTAAVAGTPTPAALQIIDSLEGFDRGRYAGPVGWVDADGNGEWAVALRCAQVDGTRITAYAGAGIVTGSNAERELAETELKFRPIIEAFA

SEQ ID NO: 94143 - protein, 431 aa, unidentified
  source 1..431: note = Lelliottia amnigena
  REGION 1..431: note = tr|A0A3S5XSU9|A0A3S5XSU9_LELAM Isochorismate synthase MenF OS=Lelliottia amnigena OX=61646 GN=menF PE=3; SV = 1
MHSISIALERLGDFLQQDIPATPGLRHFDVSFPLNDAFDPLAWLGAQIAYPQFYWQQRSGDEEMAALGVAEFFSTLSAARQFLSDGHASPDTRICGLNAFTSGQSHLFLPRLLWRRTGGAATLRLTLSSEVSLQDDARCALVFLQQLQAIRPITTLSSHIVRETHLPARPEWLSLVSQATDAIARGEFEKVVLARATDLQFDQRVTAIALMAASRRINHNCYHFCMMFDAQNAFMGSSPERLWRRRGKRLRTEALAGTVASHADDAQSHRLGEWLLNDDKNQRENMLVVEDICQRLQHHTQALEVLPAQIVRLRKVQHLRRCIWTELKTADDEQCLRLLQPTAAVAGLPRDPARAFIQRKEPFEREWYAGSAGYLSPEQSEFCVTLRCARVSDTAVRLYAGAGIVSGSVPEEEWQEIENKAAGLRTLLLMD

SEQ ID NO: 94144 - protein, 431 aa, unidentified
  source 1..431: note = Lelliottia nimipressuralis
  REGION 1..431: note = tr|A0A4Q0W862|A0A4Q0W862_9ENTR Isochorismate synthase MenF OS=Lelliottia nimipressuralis OX=69220; GN = menF PE=3 SV=1
MHSISIAIERLGQFLAQAFPPTPGTRHVDVSFPLNDAFDPLAWLGAQVAYPQFYWQQRSGEEELAALGAVHHFSSLSLARQFLQTHELSDDTRICGLNAFAPEKSHLFLPRLLWLRLGGVATLRLNLSSDHSLADDAQQARAFLQQLSPARTITPLAPHKVRETHLPEKPEWLRLISRATETIASGAFEKVVLARATDLHFDRGINAIALMAASRRLNFNCYHFCMVFDAHSAFMGSSPERLWRRRGNHLRTEALAGTVASHPDDRQAQYLGEWLLADDKNQRENMLVVEDICQRLQHHTQALEVLPAQIVRLRKVQHLRRCIWTELKHPDDEQCLQLLQPTAAVAGLPRLSARDFIQTYEPFDREWYAGSAGYLSLAQSEFCVALRSARVSDSAVRLYAGAGIVSGSVPEDEWQEIENKAAGLRTLLLMD

SEQ ID NO: 94145 - protein, 431 aa, unidentified
  source 1..431: note = Lelliottia sp.
  REGION 1..431: note = tr|A0A2S5C4C0|A0A2S5C4C0_9ENTR Isochorismate synthase MenF OS=Lelliottia sp. 7254-16 OX=2080842 GN=menF; PE = 3 SV=1
MHSISVAMERLCSFLAQDFPATPGVSHIDIAFPLNDAFDPLAWLGAQACYPQFYWQQRNGEEELAALGAVQHFSSLSLARQFLQNPSLPDDTRICGLNAFTPEKSHLFLPRLLWLRLGGVATLRLNLASDHSLQDDAQQARDFVQQLCNLKPIASLSLNKVRETHQPAKTEWLRLVSQATDTIERGAFDKVVLARATDLHFDRGVNAIALMAASRRLNLNCYHFCMVFDAHSAFMGSSPERLWRRRGKHLRTEALAGTVASHPDDGQAQRLGDWLLADDKNQRENMLVVEDICQRLQHHTQALEVLPAQIVRLRKVQHLRRCIWTELHDANDEQCLQLLQPTAAVAGLPRLPARDFIQAFEPFDREWYAGSAGYLSPAQSEFCVALRSARITDCAVRLYAGAGIVSGSVPEEEWQEIENKAAGLRTLLLND

SEQ ID NO: 94146 - protein, 98 aa, Leminorella grimontii
  REGION 1..98: note = tr|A0A485A9K4|A0A485A9K4_9GAMM Menaquinone-specific isochorismate synthase OS=Leminorella grimontii OX=82981; GN = menF_1 PE=4 SV=1
MKQISELVTQLHQRLQDVARPEPGWDRVELPLSFTARSLLGWLSAQSLFPQFYWRQRDGREEFAVCGEVVRFHDARAAYRFLVQSERSDMRVWGAERL

SEQ ID NO: 94147 - protein, 438 aa, Leminorella richardii
  REGION 1..438: note = tr|A0A2X4UJL7|A0A2X4UJL7_9GAMM Isochorismate synthase MenF OS=Leminorella richardii OX=158841 GN=menF; PE = 3 SV=1
MKQISELVKQLHQRLQDAARPEPGWARVELSLPLTVRSLLGWLSAQSLFPQFYWRQRDGREEFAVCGEVVGFHDARAAYRFLVDSGRQDMRIWGLNAFDRVDTSETAVPKGALFLPRVELLRDEQGVRLAVNLYSESSLADDVQRAQKTLTALVPSKPLPSINASVLDVHHQPEKEGWCSLLRQALSEIANKRFDKVVLARRSTLTLNKPLNPAAFLNASQKVNHRCFHFMMRMDDEKAFLGSSPECLFLRKGQRLTTEALAGTVAGSPDDEKAKALGEWLMQDKKNQHENMLVVDDICQRLQGGTQAIDVLPAEIVRLRKVQHLKRAIHATLAEVDDADTLQRLQPTAAVAGLPREPARQFIVQNEPFTRGWYAGSAGYLSAGRSEFAVSLRSALIEDDKIHLYAGAGIVAGSDPEEEWLEIENKAAGLRTLLEQEA

SEQ ID NO: 94148 - protein, 467 aa, unidentified
  source 1..467: note = Lentibacillus amyloliquefaciens
  REGION 1..467: note = tr|A0A0U4G3Q4|A0A0U4G3Q4_9BACI Isochorismate synthase MenF OS=Lentibacillus amyloliquefaciens; OX = 1472767 GN=menF PE=3 SV=1
MLEVKETGLQSMLEKAISEAKENHTARMISMTKKVNKTNPLLFIEAGKKLSVDRTFWSSTSENFSIAGIGCAHEINAKSNRMEEAEEAWQKLRDEAIIHNPYKTSGTGLVTMGGMSFDPLMQKTSLWKNFSHLSLTIPEMLLTQSDDNCYLTTNVKVNADDQAAELAQRLNKMERMLLNPSINLPGEVGIEMKQEIDPETWKQTVTYATDYIKQNYAKKIVLARKLFVKLSDEAAVSSVLKKLIEQQPNSYVFAFERNGDCFLGASPERLVKQENDEVLSTCLAGTAPRGKTKEEDDRIAHSLLYDEKNRSEHDFVVKMIRQSMEHYCRAVNVPDKPVIYPLKNLQHLYTPVTAVLNERYSIFDIIERLHPTPALGGVPRDESLAFIREHEQLDRGWYGAPVGWMDSNRNGEFAVAIRSGLIQGDKASLFAGCGIVQDSNPDEEYKETGIKFLPMLSVLGGGNHESH

SEQ ID NO: 94149 - protein, 461 aa, Lentibacillus halodurans
  REGION 1..461: note = tr|A0A1I0WTJ7|A0A1I0WTJ7_9BACI Isochorismate synthase MenF OS=Lentibacillus halodurans OX=237679; GN = menF PE=3 SV=1
MIEVSETSLQSMLEKAVNEAKINHTSPLMSMTKEIKKIDPILFFEAAKKSAMDRTFWSSTADNFTVVGVGSAYDLIAETNRIEQTEAVWKKLLDEAIIHNPYETPGTGILALGGMSFDPTKQKSVLWKNFPHLAFTIPKFMLTEWEDACYLTMNIQVGKDDHPLQLADKLKRTEDMLLNTSGYLPEEPDIDKTEEVAPTEWKRTVKYATDFIKEHSADKIVLARERLVRLTDEAVVSTTLNKLTDTQPNSYVFAFERAGDCFVGASPERLVKQDKNDVLSTCLAGTAPRGKTKAEDARIGTSLLHDEKNRREHDFVVKMIRQSMENFCSSIDVPEEPVIYPLKNLQHLYTPVNATLKEGYSIFDIIGELHPTPALGGVPRNKSLAFIREHERVDRGWYGAPVGWLDSNRNGEFAVAIRSGLIQGNQASLFAGCGIVKDSEPEAEYEETNIKFMPMLSVLGG

SEQ ID NO: 94150 - protein, 461 aa, Lentibacillus persicus
  REGION 1..461: note = tr|A0A1I1WF38|A0A1I1WF38_9BACI Isochorismate synthase MenF OS=Lentibacillus persicus OX=640948 GN=menF; PE = 3 SV=1
MIEVQEASLQSMLEKAINEAKQNHTARIMSMTKQINKADPIAFIGAGENLSMDRGFWGSTSEGFYIAGVGCAHEITAGSNRMDEAEKSWQKLRDEAIIHNPYKKPGTGLVTMGGMSFDPLSQRTSLWNNFPPLSLTVPEIVLTRSAENCYLTINVKVNGIDKASEITQRLNKLERSLLTHSSALPDDVTIEKKQEVDPESWKQTVRHATEFIKANKADKIVLARKLLVKLSDKSAVSTILYNLIEQQPNSYVFAFERNGDCFLGASPERLIKQEQEEVLSTCLAGTAPRGQTKEEDEQIAQSLLHDEKNRSEHEFVVKMIRQSMVHYCRAVNIPDNPVIYPLKNLQHLYTPVKAVLKEKHSIFDIIDKLHPTPALGGVPTEESLAFIREHEQLDRGWYGAPVGWMDSNLHGEFAVAIRSGLIQEKQASLFAGCGIVRDSDPDEEYKETGIKFMPMLSVLGG

SEQ ID NO: 94151 - protein, 461 aa, Lentibacillus salicampi
  REGION 1..461: note = tr|A0A4Y9ABK8|A0A4Y9ABK8_9BACI Isochorismate synthase MenF OS=Lentibacillus salicampi OX=175306 GN=menF; PE = 3 SV=1
MIEVKETTLHTLLDQAVNEAKYNHTTPLLSMTKKIDDFNPLLFFEAAEQLPMNRTFWSSTAEAFYIVGVGSAYDLADGADSIEQIERNWRKLVDESIIHNPYGTPGTGLLTIGGMSFDPTIRKSERWKKFSHQSFLIPALMLTKERDTCYVTFNIQVTEDDHPEQLAKRVKWMENRLFDHSGYIHGENGVESTADVAPEEWKETVKRATDYIKQDDADKIVLARELQVKLRDNAAITPILNNLIETQTNSYVFAFERDGDCFVGSSPERLVKQEKDVVLSTCLAGTAPRGETNKEDDRIGNTLLQDEKNRSEHDFVVRMIRQSMENYCLAVDVPDKPVLYPLKNLQHLYTPVTARLKEGYSIFDIVGKLHPTPALGGVPREKSLAFIRDHERLDRGWYGAPVGWLDSNSNGEFAVAIRSGLIQGDQASLFAGCGIVRDSDPEAEYEETKIKFLPMLSVLGG

SEQ ID NO: 94152 - protein, 463 aa, Lentibacillus sp.
  REGION 1..463: note = tr|A0A549YMA7|A0A549YMA7_9BACI Isochorismate synthase MenF OS=Lentibacillus sp. NKC851-2 OX=2584959; GN = menF PE=3 SV=1
MIEVKLKSFESLLSKAITKAKTTEYNQLVSMTEEIHEVDPVRFFASAKTLSMDRVFWTSTSEQFSIVGVGCAWNIELEENRTETIENHWQQLLDEAIIDNPYQVPGTGVVGLGGMSFDPSVRKSSLWNKFSHRSFQVPNVLLTKHNARNYLTINLQVKANDDLQELTEWVEQSKDILVNSSERLPECAGIARQQEIAPDKWKQTVKLAADKIKAHAAQKIVLARELRVTMTDDVQVASILRNLLEKQPDSYVFAVERAGDCFVGASPERLVKQDNNQLFSVCLAGTAPRGKTEAEDREIGENLLHDDKNRSEHDFVVKMIRQSMEAYCDAVHVPETPVIHPFRNLQHLYTPVTAQLKRGYSIFDIIEKLHPTPALGGVPREASKDFIRKHEQLDRGWYGAPVGWFDSNRNGEFAVAIRSGLVQGDKVSLFAGCGVVKDSDPEAEYKETMIKFRPMLSALEGRQ

SEQ ID NO: 94153 - protein, 460 aa, unidentified
  source 1..460: note = Lentisphaerae bacterium
  REGION 1..460: note = tr|A0A3M0Z585|A0A3M0Z585_9BACT Isochorismate synthase OS=Lentisphaerae bacterium OX=1932692; GN = D6820_09615 PE=4 SV=1
MNGILSSSAKTSWTDWLGTLRVELSQRSGLRADSCELFGPDLAPDQIFLLLAGVSLTPLVYLEYTSLEQQRVWLIAGGGRISRKGCACADRSSPPDSHFLAFLPFPGATTDCEVKCDPWQARAQPCRLYPQFIFQGSVTDGSTRFLYLRPPALSPDSSSLLALLDLFEEAASASQAMASSTLDMNLVSLVPSQQQWFRYLQTIQQAIAKDELQKVIAARFSQYSLSDPVQAHLAFLRLRSQTPTANHYFVSLDQDSCWFGASPEILYQRSGSHIMTQAVAGTRPFQNHHERDRQAYFDLLHQDKEHREHAIVVRAIEEKLIQLGVTLEEQNLRHVIRIGNLLHLCQYIHGHLPPDFDEKNLCRALHPTPAIGGYPQDKAIAFITRHEPFYRGYYGGLICLHTPDHTLSVVTIRTLLFRGDSLYTFVGAGITAESDPSREWEELQTKELALLSWNRESGRE

SEQ ID NO: 94154 - protein, 460 aa, unidentified
  source 1..460: note = Lentisphaeria bacterium
  REGION 1..460: note = tr|A0A3D3JUN4|A0A3D3JUN4_9BACT Isochorismate synthase MenF OS=Lentisphaeria bacterium OX=2053569; GN = menF PE=3 SV=1
MDLVQEPVQEKFQLAEKIQQLLTSNGDKAAAGPSLVRVTVDIRPTDPLTWLAVQPHDVKTYWCDRERRLEIAGVGIAAQEPTSTDTSEMLQRLRSQLTTDNGTRWLGGFSFDGRDATQNDTDWEWYGRGRFIVPRFEVIAENGVQHLACNLRCDSNGLTFDDIQSALNDLDAIRHPAATADMRLPAVLTRDDTPGLKDWTHNVEAALEAISRGHFDKVVLARQTIFHLDGSLAAPALLHGLREDTHHCFLFCFQPRRDIAFFGATPELLYRRIGRQLTCEAIAGTQPRGESQNEDLTLGRELLASEKDRREHRFVAEHIRERLVLLGESTDFDEPTLLRLASIQHLQQHFDTGLGAEVSDADILAALHPTPAVGGSPRNTALSWIKEFEPFCRGAYAAPVGWIDRDNAEFAVGIRSALYQNDALSLFAGAGIVDGSVAAREWAELDSKIETFRRLLAAPY

SEQ ID NO: 94155 - protein, 410 aa, Lentzea sp.
  REGION 1..410: note = tr|A0A563EKW6|A0A563EKW6_9PSEU Isochorismate synthase OS=Lentzea sp. FXJ1.1311 OX=2591470; GN = FKR81_31215 PE=4 SV=1
MTSAPTSRARQRLRVLTRRDDAEDLLARLPDPDHALAWVRDGSGLVGWGEAARLEVRGPDRFEQADRWWREFVEHLDVEDELGVPGSGPVAFVSMAFADEPGDSVLIVPEVVIGRRNGDTWVTTIGSSEAEPAVAPMRRPATVRYANGQLPVTAYREAVREAVARMRQGELDKVVLAHDLVAVTDKRLDQRFVLRGLARRYPECWTYAVDGLVGATPELLLRRTGSVVDSRVLAGTTWPHDGMSDQELADSLMSSDKDLEEHNYAVTSLADTLRPYCTTMSVDGPSVLRLPNVSHLSSDVIGTLGSSASLLRLGAAVHPTAAVGGTPTLDATMLISQLEGMDRGRYAGPVGWIDGNGDGELGIALRCAQIEGSTARLFAGCGVVADSDPDTEVQEAHAKMLPMREALEGL

SEQ ID NO: 94156 - protein, 473 aa, Leptolyngbya sp.
  REGION 1..473: note = tr|K9ELU1|K9ELU1_9CYAN Isochorismate synthase family protein OS=Leptolyngbya sp. PCC 7375 OX=102129; GN = Lepto7375DRAFT_6829 PE=4 SV=1
MTVAPYQSDLFKRCKEIYGFLSDCQRQATYSQHAKLANFTVPISPIEPWLALQQLEKTYPIHFYYSTPQYTLLGLGITVAQQAAGPDRFERMQQFVDVWKRRILSSNQSGSIIQPYFLCGFTFFEQANGLFDPAQVFVPQLQILQRNGQTTASLNYLIDDAVNITRVVDDIRQQIQAIETAAEKTSHTTFTTSSRTLQTPKVIRDVGNFEQMVGSVLPALKRSTLHKVVLADALDVLSASPFNIPASLKTLGIAYSDCCIFSFSNGEGSVFIGASPERLLSITTSVNGKQLTTDALAGSAPRGDTLNSDQLIAEQLLNNPKERYEHQVVVEFIIEQLIKLGLNPQFAVSPEILRLANIQHLHTPIQASLPHNIKPLTLVKTLHPTPAVAGLPRPSASQLLKTTESFDRGLYASPIGWIDAKGNSEFVVGIRSALIQGRQARLFAGAGIVAQSNPRSELAEVKLKLQALLGALV

SEQ ID NO: 94157 - protein, 444 aa, Leucobacter sp.
  REGION 1..444: note = tr|A0A373DJ51|A0A373DJ51_9MICO Isochorismate synthase OS=Leucobacter sp. wl10 OX=2304677 GN=D1J51_12730; PE = 4 SV=1
MTSDRDVPRLRAITRTLAATPDLLSLADPRHPLLWYRGDRACVGVGEALRLTFSGPARFAEAAERWREIAAAAEIDDPVRMPGTGLVALGSFTFANRSAAESVLVVPRTLVARHRDRWWITEVAVLSSDDPPPSPDALELPAPQPPGSWAGTAFAAPRAGSRAGEPVDRTAPDSAAVDAYLSGVRQAMHRISQGDAEKIVLARQVSGGIAADDDLRVPLRRLAERYLDCWTFAVDGMLGASPETLIRSTGGAVSARVLAGTRGRHPESAGRDAQARDELLTSAKEQHEHAFAVQSVVTALSPHVRELRTSEEPFTLRLPNVWHLATDLGACLGERSSSLELVGALHPTAAVAGTPTAAAVDAIAELEPFDRGRYAGAVGWIDAAGDGEWVIALRCAQVGAADPETGERSVVASAGGGIMADSDPEHELGETVSKLRPITEAFAE

SEQ ID NO: 94158 - protein, 441 aa, unidentified
  source 1..441: note = Leucobacter triazinivorans
  REGION 1..441: note = tr|A0A4P6KG54|A0A4P6KG54_9MICO Isochorismate synthase OS=Leucobacter triazinivorans OX=1784719; GN = EVS81_10405 PE=4 SV=1
MTTDHGVPRLRAITRPLAEAPDLVSLADPEHPLLWLRDDRGCVGVGEILRLTFTGPTRFRDAAAQWRRIAEAAVIDDPVRLPGTGLVALGAFAFADRSAAESVLVVPRILVARHRTSWWITEVSCADAPATSAPLRPEARPQGSWPGTAFGASPTDPRAGAADEPDRETHSDAVAAYLDGVREAGRRISEGEAEKIVLARQLGGTIPRDADLRIPLRRLADRYLDCWTFAVDGLVGASPETLVRSTSGAVSARVLAGTRARHPEDAKRDARARDELLTSAKEQHEHAFAVQSVVTALSPYVRELHTSEEPFTLRLPNVWHLATDLGASLGERSSALELVGALHPTAAVAGTPTSAAVAAIDELEPFDRGRYSGAVGWIDAEGDGEWVIALRCAQVSPADPGTGERAVVASAGGGIVAGSDPEHELGETVSKLRPITEAFAP

SEQ ID NO: 94159 - protein, 396 aa, Leuconostoc citreum
  REGION 1..396: note = tr|B1MZ28|B1MZ28_LEUCK Isochorismate synthase; OS = Leuconostoc citreum (strain KM20) OX=349519; GN = LCK_00953 PE=4 SV=1
MQYTFTRPLKSNDEHSLLVMLDTYAISAYFETPNQDKKLFAYGAEKISNDFNNINGEIIFGGQQFNQTYFKDSVLMNGFWFLPTIYVELTESSLTFHSETINDFDSWLIKTKQLLKQQVSILNTQDEEDWPTRTQMLITDLNSDAEVKKVVFGRQRQNQLSRPLYAANLIMALSVQQNTYHVVLKNQNELFVSATPERLVKVSSGYLETAALAGTINRGLTPSEDQLLGESLLSSVKNRQEHAYVVHELKQKLQTMTTCLDVPETPILLKNKQVQHLYTPINGKLAQYGITDIMTALHPTPALGGVPKALALAYINAHEKQPRGLFASPIGYYTGSGDGEFAVGIRSMLINQTTRIATLFAGAGIVADSIAEEEYEETGLKFEPMQQLLKDYNHGE

SEQ ID NO: 94160 - protein, 397 aa, Leuconostoc gelidum
  REGION 1..397: note = tr|A0A175CD51|A0A175CD51_LEUGE Isochorismate synthase @   Menaquinone-specific isochorismate synthase; OS = Leucono  stoc gelidum subsp. gasicomitatum OX=115778; GN = PL111_16 18 PE=4 SV=1
MKYHFSRDLCDSDRAQLNRALDFFNITAYFKTVDGQEELFGFGAQQEADVPNKLNGTMIFGGYPFDQQVVENSKLMNGIWFVPIIFVKITQNIVIFESDTVENFNEWLTKFKTIARSKVVSHVITSELDWTSRTQKLINTIISNDKLKKVVFGRQHQYALSDTLLASTLVHALITQKNTYHVILKYQKEMFVSATPERLVKVTDGAVTTAAVAGTIRRGNTQTEDKLLGDMLLNSHKNQQEHRYVVNSIYQKIQNMTTSLNLPPQPILLQNRQLQHLYTPISARLIKKYTVLDIVNALHPTPALGGVPQKQALDYIRAHERSPRGLFAAPIGYYTSNNSGEFVVGIRSMYINHAAHTATLFAGAGIVSDSNATQEYQETNLKLEPMRQLLKGDVNDN

SEQ ID NO: 94161 - protein, 397 aa, Leuconostoc lactis
  REGION 1..397: note = tr|A0A5B8TAH2|A0A5B8TAH2_LEULA Isochorismate synthase OS=Leuconostoc lactis OX=1246 GN=FGL83_07370 PE=4; SV = 1
MTYHETRALAQSDLQQLYAALETTEFGAYFATPADDTLRFGIGAIATAKTAQALQGAVVFGAQSFDEQEYPQSELMAGFWFVPEVMVTIAADKITFGSDTVSDFTTWLAQFVPKQPNTVTTSHVTDEVDWIERTENLIDTLAIDQTLAKVVFGRQQTLQLSDTLRLAQIIRALAEQANTYHVVLKRHDELFISATPERLVAMSGGQIATAAVAGTSRRGTDGADDIALGEALLASQKNRIEHQYVVASITTRLQDVTTSLKVPAMPSLLKNKQVQHLYTPITGDIAAHLSVTAIVDRLHPTPALGGVPREAALYYIATHEKTPRGLFAGPIGYFTADNSGEFVVGIRSMYVNQTQRRATLFAGAGIVADSDAQQEYEETGLKFEPMRQLLKDYNHVE

SEQ ID NO: 94162 - protein, 384 aa, Leuconostoc mesenteroides
  REGION 1..384: note = tr|C2KKL9|C2KKL9_LEUMC Isochorismate synthase; OS = Leuconostoc mesenteroides subsp. cremoris ATCC 19254; OX = 586220 GN=HMPREF0555_1185 PE=4 SV=1
MDRSLLNQMLDNVQVSAFFETSDKKSTMYAFGQKKIWSKMPDKTDSIVFGASSFDDQLEAGIMKGFWFEPEFLVLLQDNQLLSSTTSIDDYLMQLSQLKKPQAPQIIDESAETDWQARVQALINEFSVNRSLKKVVFSRQQQITLSAKLVLSKVIPALQKQQDVYHVALKRDTELFITATPERLVKINDNQVETAAVAGTIRRGQIDLEDVKLGKELLNSEKNNQEHRYVVDNIVQQLGSLTNQLHVPNKPFLLKNKQVQHLYTPIQGTLATNISIKDVVGKLHPTPALGGLPRKNALVYIRNYELHPRGLFASPIGYFTKNNFGEFVVGIRSMYVNGRNVRLFAGAGIVAESDSQQEYYETTLKFQPMLELLEELSNDGHTNF

SEQ ID NO: 94163 - protein, 398 aa, Leuconostoc pseudomesenteroides
  REGION 1..398: note = tr|A0A5B8T529|A0A5B8T529_LEUPS Isochorismate synthase OS=Leuconostoc pseudomesenteroides OX=33968; GN = FGL85_06665 PE=4 SV=1
MQKSENHFFKFEREATSNDYQVLNQMLDHFQVSAFFENNTGTQIFYAFGSKNSWQTLPQKVNTLVFGANTFDGQHSKGELMNGFWFEPEIIVSISNGRLQSNDLNLDNILVNYQQISTTKRVKIKNIVSETDWIVRVADLIKNLNDVRCPMDKVVFGRQEMIELSEQIRISSLLEALKKEHGVYHVILKRENEVFVTATPERLAFVSQGEIQTAAVAGTAPRDPDPKRDHELGNKLLHSLKNQREHQFVVDSIKMKLEALTTQLNVPSKPILLKNKQVQHLYTPISGTLSANISVKDLVDNLHPTPALGGVPQEEALQYIAQHEQQPRGLFAGPIGYVTADNTGELVVSIRSMYCDQTHARLFAGAGIVAGSEAQQEYNETALKFEPMLQLLGELMHD

SEQ ID NO: 94164 - protein, 400 aa, unidentified
  source 1..400: note = Leuconostoc suionicum
  REGION 1..400: note = tr|A0A2N9KAK8|A0A2N9KAK8_9LACT Salicylate biosynthesis isochorismate synthase OS=Leuconostoc suionicum OX=1511761 GN=pchA PE=4 SV=1
MVIIDELIRYRRTLRSIDRSLLNQMLDNVQVAAFFETSDKKSTMYAFGQKKIWSKMPDKTDSIVFGASSFDDQSEAGIMKGFWFEPEFLVLLQNNQLLSSTTAIDNYLMQLSQLKEPQAPKIIDESAEADWQIRVENLINELSVNRSLKKVVFSRQQQVTLSSKLVLSEVIPALQKQQNVYHVALKRDTELFITATPERLVKINDNQVETAAVAGTIRRGQIGLEDVKLGKELLNSEKNNQEHRYVVDNIVQQLDSLTKQLHVPSKPFLLKNKQVQHLYTPIQGTLADNISIKNVVQKLHPTPALGGLPRKEALAYIRNYELHPRGLFASPIGYFTKNNFGEFVVGIRSMYVNSQNARLFAGAGIVADSDSQQEYHETTLKFQPMLELLEELSNDGYTNF

SEQ ID NO: 94165 - protein, 437 aa, unidentified
  source 1..437: note = Limnobaculum parvum
  REGION 1..437: note = tr|A0A2Y9U149|A0A2Y9U149_9ENTR Isochorismate synthase MenF OS=Limnobaculum parvum OX=2172103 GN=menF; PE = 3 SV=1
MKQISELVKQLHKRLQEVARPEPGRERITVSLTLQQRTSLLSWLAAQPIFPQFYWRQRDDLEEAAVCGEVIRFNDADSARYFLMTNDVADMRIWGLNTFDQVETPSLNTPKSALFLPRIELLRDMDGGKLVVNLYSETSLADDVAIAQKTIEQLTTSRPLPVLNVNVNSVQHQPEKQGWCDLLNQALEAIQQGQFEKVVLARKSTLSLNEPLNPAAFLNASEKVNHHCFHFMMRMNDKTAFLGSSPECLFLRVGQHLTTEALAGTVASSSDNQQAKQLGDWLMQDKKNQHENLLVVDDICQRLHGGILAIDVLPAEIVRLRKVQHLRRCIHAELAVANDADSLQRLQPTAAVAGLPREPARQFILQHEPFTRDWYAGSAGYISLNQTEFAVSLRSALVEGSNIHLYAGAGIVAGSDPEQEWLEIENKAAGLRTLLEE

SEQ ID NO: 94166 - protein, 491 aa, unidentified
  source 1..491: note = Limnospira indica
  REGION 1..491: note = tr|H1WAT9|H1WAT9_9CYAN Menaquinone-specific isochorismate synthase OS=Limnospira indica PCC 8005; OX = 376219 GN=menF PE=4 SV=1
MLAVPPPQLLWQDRRELHRFLCECQQNCLVNSDPQIISIVREIDAVDPLRFLEAFLTEDKPHFYFEKAQSKQAIVGGDAAVKLTINNGERFAKSQEFIDAWFRRTIIAGSESNLAAPAFCCSFTFFQDNYQSNSEHYYLRNYPDVDNYHSRPVFPAATVFLPAILLYQKGDRYTLLINVLVDKKSDIEAVTASIWGKIDKVNGLQSGRIQSEITNKLHPQTIWINPQVGEFHHSVSENLRLISTGKLSKVVLSQAFDICSDTPFRLINSLANLRSLYPDCYIFSTGNSQGKNFIGASPERLITVNQGNCSTDALAGSAPRGETQAEDTEIAHRLLSSDKNLREHQAVVDFIIERLLHLGLTPERSPKPRLMQLSNIQHLWTPITSPISADIHLLDILAKLHPTPAAAGTPCEVAIAQIRQYETFDRSLYAAPLGWVDYHGNGEFIVGIRSALIDSDRARLFAGAGIVAGSEPEQELAEIQLKLQALLRGLV

SEQ ID NO: 94167 - protein, 489 aa, unidentified
  source 1..489: note = Limnothrix sp.
  REGION 1..489: note = tr|A0A372DUE2|A0A372DUE2_9CYAN Isochorismate synthase OS=Limnothrix sp. CACIAM 69d OX=1890733; GN = BJG00_000705 PE=4 SV=1
MLSALGQQTDLLSPTRLYCILEAARDEFLRSFRSQIVRLTFEIPALDPLEVFAEFSQADCLSFYFEKPDRRSAIAAFDRTVSLAVAGSDRFTKTKAFARKIHGLLRASDRAYGRAEGDRPASTRSIPSLLCAFPFLDEPRDLGSPFGEALIFLPRWQVVRRTTAQGPITTFTANAWVDGCTDLDQLCGELWQPLDRLLQWRSSSTSLSARTARYQSSGWELAAPDDPAFLAAARSALKDIADRQFCKVVLARAIDWQAPEPLDPALLLHNLRHRHPGCYTFAVGNDRGQTFLGASPECLVAIDHGRIATEALAGSAPRGTTPELDRIWGNRLLNNPKELHEHRLVADFIADRLAQLGAHPKVAVKPGLRKLSNIQHLQTPICGRLPRNVDPLDVVAALHPTPAVAGLSRSAAIAAIDRYEPFERSLYTGAIGWLDPMGNAEFAVGIRSALIQGDRARLFAGAGIVAGSDPERELAEIQLKLQALWAALI

SEQ ID NO: 94168 - protein, 463 aa, unidentified
  source 1..463: note = Listeria fleischmannii
  REGION 1..463: note = tr|H7F7P0|H7F7P0_9LIST Isochorismate synthase dhbC; OS = Listeria fleischmannii subsp. coloradonensis OX=1081736; GN = dhbC PE=4 SV=1
MGITLPLALFEQAKRHATKDKPALLSWVHECPEDLAPHLLYQKAKDAFSGERFFWQNPEMTLTLAGFGVTEQYLAADKAKDAFSGLEDKINALKLRTVTNATEKGTGPLYFGGFKFDPERETDKEWQAFKDGLFYLPLFLVTKKGKEVFLTVNLVVYPDDEVKKLEAVRGQWEKIIDAKRPEMEVDALITAKELETDEFLENARDIIALLKDSEDLHKVVLSRRMGLRFSKQIDSGAVLQKMMDTQENSYFFVMEKGAALFFGATPERLVAVSEDKIHSSCVAGSAKRGRTKEEDEQLGNALLKDAKNLREHHYVVEMIEETLQQFADDLTISSEPVLLKNRDIQHLYMNVHAKKRNDVNILQIARALHPTPALGGSPKDLARAIIRMKETSDRGFYGGPIGFIDTDFDGEFAVAIRSGLVIDALGVLYAGCGIVSDSVPEEELQETKVKFQPMLRVLGGNVE

SEQ ID NO: 94169 - protein, 474 aa, Listeria grayi
  REGION 1..474: note = tr|D7V0I9|D7V0I9_LISGR Isochorismate synthase; OS = Listeria grayi DSM 20601 OX=525367 GN=menF PE=4 SV=1
MEDVNVKGELKNMSVKDALELFEQAKQVAATKQNTLLSWVTELPADTNVINVFEKAASSFRGERFFWQDPEQGFTYVGLGVTNRYTAEEEDSFQGLKERMAELKKHLVTNKVEVGTGPLFMGGFRFDKEKAVAKEWHSFRKATFYLPLYLLSEVGGKVYLTVNTFVFPDDSTKKWAAMKEQWERIISSDVPKLQAPELTLAKELDKDYFLQSTQEVIDLINQSEKVNKVVMSRRMSLKFGKQVDNNYVLEKMLETQENSYFFIMENGNTSFFGASPERLIAINDDTLMSSCVAGSTPRGKTPEEDEKLGSVLLQDGKNVKEHHYVVDYMQEKLAPFTNDLTLATDPILLKNRDIQHLYIRIEAEKKAEAELLDILQTIHPTPALGGTPQKMAMQIIRLKEELDRGFYGAPIGWIDFDGNGDFAVAIRSGLITDANGYLYAGCGIVADSVPEEELQETAVKFQPMLRIMGGLKND

SEQ ID NO: 94170 - protein, 462 aa, Listeria innocua
  REGION 1..462: note = tr|A0A476UXN8|A0A476UXN8_LISIO Isochorismate synthase OS=Listeria innocua OX=1642 GN=E1I03_13700 PE=4; SV = 1
MNTKLPLDLFNQAKRSASQDQPALFSWVTELDELVSPVKLFKKAGTAFKGERFFWQNPEMTLTMTGFGVTKQFLAEKKKDAFLGLQEKIEKRLRTCVTNATVDATGPIYFGGFAFDPERDTEKEWQSFKDGLFYLPLFMLTNKDGKSYLTVNLSIYSDDTESKLEAVFNQWQKIIHQEVNEAEMALLTDFKEIGKEHFLETASEIIDMINHSEDVKKVVLARRMGLRFQRQVDSAIILENMLATQENSYFFLIEKGTGVFFGATPERLLAVNGDTIQSSCVAGSTERGATNDADEALGNALLQDAKNLREHSYVVQMMEETLKPFTTGLSLSSQPVLLKNRDIQHLYMNITAKKKPDVTMLEMVKALHPTPALGGLPQKMGLAIIRMKEEMDRGFYGAPIGWVDLKGSGEFAVAIRSGLIIDSQGLIYAGCGIVGDSVPKEELKETEVKFQPMLRVLGGIKK

SEQ ID NO: 94171 - protein, 462 aa, Listeria monocytogenes
  REGION 1..462: note = tr|A0A3A2XRG2|A0A3A2XRG2_LISMN Isochorismate synthase OS=Listeria monocytogenes OX=1639 GN=B4Y57_00120; PE = 4 SV=1
MNTKLPLDLFNQAKRSASQDQPALFSWVTELDELVSPVKLFKKAGTAFKGERFFWQNPEMTLTMTGFGVTKQFLAEKKKDAFLGLQEKIEKRLRTSVTNATVDATGPVYFGGFAFDPERDTEKEWQSFKDGLFYLPLFMLTNKDGKSYLTVNLSIYSDDTESKLEAVFNQWQKIIHQEVNEAEMALLTDFKEIGKEHFLETASEIIDMINHSEDVKKVVLARRMGLRFQRQVDSAIILENMLATQENSYFFLIEKGTGVFFGATPERLLAVNGDEIHSSCVAGSTERGATEEADEALGNALLKDAKNLREHSYVVQMMEETLKPFTTGLSLSSQPVLLKNRDIQHLYMNITAKKKPDVSMLEMVKALHPTPALGGLPQKMGLAIIRMKEEMDRGFYGAPIGWVDLKGSGEFAVAIRSGLIVDSQGLIYAGCGIVGDSVPKEELQETAVKFQPMLRVLGGIKK

SEQ ID NO: 94172 - protein, 462 aa, Listeria seeligeri
  REGION 1..462: note = tr|A0A5B8AB61|A0A5B8AB61_LISSE Isochorismate synthase OS=Listeria seeligeri OX=1640 GN=EOT00_08865 PE=4; SV = 1
MNTKLPLDLFNQAKRSASQDEPALFSWVTELDELVSPVKLFKKAGTAFKGERFFWQNPEMTLTMTGFGVTKQFLAEKKKDAFLGLQEKIDERLRTSVTNATVDATGPLYFGGFAFDPERDTEKEWQSFKDGLFYLPLFMLTNKDGKSYLTVNLSIYSDDTESKLDAVFNQWQKIIHQEVNEAEMALLTDSKELGKEHFMETASEIIDMINHSEDVKKVVLARRMGLRFQRQVDSAIILENMLATQENSYFFLIEKGTGVFFGASPERLLAVNEDTIYSSCVAGSTERGATPEEDEALGNALLGDAKNLREHSYVVQMMEETLKPFTTGLSLSSQPVLLKNRDIQHLYMNITAQKNPDVTMLEMVKALHPTPALGGFPQKMGIAIIRMKEEMDRGLYGAPIGWVDMKGQGEFAVAIRSGLIVDSQGLLFAGCGIVGDSVPKDELKETEVKFQPMLRVLGGIKK

SEQ ID NO: 94173 - protein, 464 aa, Listeria sp.
  REGION 1..464: note = tr|A0A3N9TT61|A0A3N9TT61_9LIST Isochorismate synthase OS=Listeria sp. SHR_NRA_18 OX=2269046; GN = DUK53_00150 PE=4 SV=1
MGLTLPIELFQQAKRRLNSQQENVLLSWVCELPGGMAKRVFDQGNEFFKGERFFWQNKERTLRLAGLGAMDQLRVEQGHDRFLALHTRKEQVLERTVTNSEETACGAVYFGGFSFDDQHDASPEWEKFGEGFFYLPLFLVTEKEDRCYLSVNLWLSEDDDYAKVEAVMAQWDKVAASSVVQDTEVACILEERLAEDAWLRAATDVVALLQESPNMQKVVLARRMRLGFDGFLSSSRMIAHMEEQQANSYCFVLENGTSTFFGATPERLLMADSSHLESACVAGSIARGETASEDAMLGDALLSDAKNLAEHHFVVEMIQGTMARFCEDVQVSASPVLLKNRDIQHLYMTVSGRRGEAKLLDVLRALHPTPALGGWPQAEAMTVIRLKEEMDRGFYGAPIGWIDPLDRGEFAVAIRSALAIDTNALLYAGCGIVADSVPVEELAETAIKFQPMLRVLGGKVHERS

SEQ ID NO: 94174 - protein, 367 aa, Litoreibacter sp.
  REGION 1..367: note = tr|A0A5B8J9S2|A0A5B8J9S2_9RHOB Isochorismate synthase OS=Litoreibacter sp. LN3S51 OX=2599296; GN = FPZ52_14845 PE=4 SV=1
MTHHDQDFAQRRAGAAAPPPFEFRVKGRRLVSTDTQPVDLATVNGLKTGEIIAGALPFEDSHPARLWRGMVQEKPDITSPMLPDYRWILRTEPEGTDYIRAVQQAVGQMQASNLQKVVLARTLLARADRNIDLPALLTRLAADENATAFLVQLSAQTWLVGATPELLVETSGRTIRSFPLAGSLPRQADAQADRTAEKSLQASVKDLHEHRFVVEHIMDTLAPHCTDLRAPDGTATTSTRTMWHLGTRIAGVLKADGPSSLELAQLLHPTPAVCGVPRAAAMDVIRRSEPVRRDYYAGCVGWCDGRGDGAWHVSIRCAEVSGRDARLYAGAGIVAQSDPQSELVETRAKFGALLAALGCEITVHKDI

SEQ ID NO: 94175 - protein, 470 aa, unidentified
  source 1..470: note = Litorilinea aerophila
  REGION 1..470: note = tr|A0A540VHD3|A0A540VHD3_9CHLR Isochorismate synthase OS=Litorilinea aerophila OX=1204385; GN = FKZ61_08405 PE=4 SV=1
MTPHPPRPPQADLPSPGVEYRPDFQGRLISACCPAEGIDIYTFLRHGEQQPRFYWRDGSQDIQFAGVGVALSLMGWGEGRFHQIQRQARSLFTQALAMDEGPSLAAPRLFGGFAFRQDFVPDFTWAAFHPAHFILPHYQLVTCRGESWLTINALLAPGESARARQQALQEALAARYRLLRSLPKVIPAPPSAPQVEVDYPLSYPAWAAMIEEALRHFAAGRMDKVVLARICQVRSPTHLDIDAALFHLDQRYPGCYTFLVEPRPHHAFFGAPPELLVAVQGSRLQTMGLAGSAPRGATPQEDEALAAELLASAKDRHEHALVVQAIQERLAPLTTALTAPATPEIMRLSNIQHLFTPIQAELRRPDGVLPLVELLHPTPALGGWPRDAALAFIQEHEQTPRGWYAAPVGWIDRNLDGAFSVAIRSAVVQRRRAWLYAGAGIVAASRPEREWEETGWKFRPVLEALGVWRG

SEQ ID NO: 94176 - protein, 427 aa, Lonepinella koalarum
  REGION 1..427: note = tr|A0A5D1ZNF4|A0A5D1ZNF4_9PAST Isochorismate synthase MenF OS=Lonepinella koalarum OX=53417 GN=menF; PE = 3 SV=1
MENLCSGLIKQIQAHKLSALSAITYFKSEMQLTVELLAWLKAQEMYPQFYLNYRDEPITIASLGKVRLFSDEKMAQQFVQQQDLPLVGGLTFSKQAKFWLPRLLLENVDNILHVTIYFDNEQDFVTEQYACLQAAKTLEKFTALQSVKQVVHKIGQKANTEVWTNWIEQGLAEIKQGHLSKVVLANQTEFLSNQPIDAKDFLAESEQQNTGCYHFLLAEQAECAFVGSTPERLYTRQGQHMQTEALAGTATITDNPQYNQQQTDWLLNDRKNDHENRLVVQGICENLQPYVSHIAVCDVEVKQLRQVQHLRRCIQAELKNNVADGVCLQTIHPSAAVSGLPQQSAVQFLQKTENFDRSWYAGTLGIMRKLQAEFCVAIRSAFIEQQGEQSKIRIFAGAGIVAGSVPLLEWQEIERKASSLLSLLTIE

SEQ ID NO: 94177 - protein, 471 aa, unidentified
  source 1..471: note = Longibacter salinarum
  REGION 1..471: note = tr|A0A2A8D2Y1|A0A2A8D2Y1_9BACT Isochorismate synthase MenF OS=Longibacter salinarum OX=1850348 GN=menF; PE = 3 SV=1
MNTSDSLAVSRVRQIDAADAVRSSLVRQVRAAIQGVNGHRTVRRVLVDVEQRVDTADFLRSQAFETSVYWAGRGTDRSVAAVGAAEVLSGKSGAVDTDVLEDAIVARAQSLPDGARYYGGMRFDAFQATNNDYPDRGWESFGTYRFVLPRFELIQSGSEQHIVCNIVGPSDVKHIDEVVADVNRLLLPAKRQRSPGFPSPTGRTDVPARENWMSIIQGVLESISAGAVEKVVMARSATLSHDVDVDPYAVLQQLAPATPNCFHFSFDFGGDSTFVGASPERLFRQTNCTVYSEAVAGTRSRAQTTREDRALRDDLMTSDKDRREHAFVEDAIREMLAPLCTTLDSPNQRTEMKLSGGRHIWTRIEGTLNDDVSPVALLAALHPTPAVGGVPSERALETIREREGFDRGWYAGPVGWIGKDEAEFAVAIRSARIRGAQMALYSGAGIVRGSDPQEEWDEIEQKIGNFLSLVD

SEQ ID NO: 94178 - protein, 468 aa, unidentified
  source 1..468: note = Longimonas halophila
  REGION 1..468: note = tr|A0A2H3NX96|A0A2H3NX96_9BACT Isochorismate synthase MenF OS=Longimonas halophila OX=1469170 GN=menF; PE = 3 SV=1
MIPLSLVSAPSDDRIDADAVRQALRAKVRQAVQSMNGVKQVRAVSVKVPVAIDPLAWGAVQTQAPFVYWRSRTTDSTYAVVGAARQWQGEAGSGETVPASVVERLAPWLDRLPPAVRLWGGARFDPTSEREAAWADFGAWTFMLPRFTLHRSGSTTRLHATLVAPHDTAAHEALLRQIDALRFPNIPDAHTDAHRIRRTDRPTRAEWMRQVRAAVQSIRSTDLRKVVLARAVDLHFDHALMPWALLHRLQQETPQCTAFGWQPKRSGPAFIGATPERLFRMHGDTLRTEAIAGTRPRGATPADDAMLRHELLTSDKDRREHAFVQDAIADALAPLATDVNMPDAPSELALQRKRHLRSEITATLHESTSPLNVLNALHPTPAVGGTPTRTARAFIREHESFDRGWYAGPVGWMTQDAAEMLVAIRSALVDRDTLTLYSGAGIVEGSDPASEWDEIENKLADFKAALER

SEQ ID NO: 94179 - protein, 441 aa, unidentified
  source 1..441: note = Lonsdalea britannica
  REGION 1..441: note = tr|A0A1X3RN89|A0A1X3RN89_9GAMM Isochorismate synthase MenF OS=Lonsdalea britannica OX=1082704 GN=menF; PE = 3 SV=1
MEQLSGLLQRMERALGASLPDNAGFRTFTLSAESGDAAALLAWLAAQALYPQFYWQHRREPEEAAACGAVCTFASVSEAEAFLQREDIDDDVQLWGLNAFGYPTLAQAEPLDGYLFLPRVTLRRQGERVQLRVNIFSKISLRQDAEIALSALRQLSAAHPLPPLSATVRLTAHHPEKAQWTDLVQQALTEIEGGALEKVVLARMTRLTLDHPLPAATLMSASRTANHHCYHFMLAFTSESAFLGSSPERLYRREGKRLETEALAGTVANDRDDRRADELAKWLMQDAKNQNENQLVVDDIRQRLSQAATALDVLPMETIRLRKVQHLRRAIRAELYDAKDRACLQLLQPTAAVAGLPRAAARDYLACYEPFDRGWYAGSAGYLSRQQSEFCVSLRSADVERDRLTLYAGAGIVAGSDPQQEWQELENKAAGLKSLLDSDMS

SEQ ID NO: 94180 - protein, 441 aa, unidentified
  source 1..441: note = Lonsdalea iberica
  REGION 1..441: note = tr|A0A1X3RVZ7|A0A1X3RVZ7_9GAMM Isochorismate synthase MenF OS=Lonsdalea iberica OX=1082703 GN=menF PE=3; SV = 1
MKQLSGLLQRMERALGAPLPDKAGFRTFTLSAERREDAELTAWLAAQTLYPQFYWQHRRDPEEAAACGAVCTFASASEAEAFLQREDLDDDVRLWGLNAFGYPTLAQAEPLDGYLFLPRITLLRQSERIVLRVNLFSAVSLRQDADNALKALRQLSMAHPLPPLAATVKLTAHHPEKQPWTDLIAQALAEIEAGALQKVVLARTTRLTLDRPLAAAALMAASRAINHDCYHFMLVFTPQRAFLGSSPERLYRREGNRLETEALAGTVANDLDDRRADELAQWLMQDAKNQNENQLVVDDIRQRLSQAATALEVMPLETIRLRKVQHLRRSIRAELHEAKDRACLQLLQPTAAVAGLPRAAARDYLACYEPFDRGWYAGSAGYLSRQISEFCVSLRSADVEGDRLTLYAGAGIVAGSDPQQEWQELDTKAAGLKSLLDSDMS

SEQ ID NO: 94181 - protein, 395 aa, unidentified
  source 1..395: note = Lonsdalea populi
  REGION 1..395: note = tr|A0A3N0US47|A0A3N0US47_9GAMM Isochorismate synthase OS=Lonsdalea populi OX=1172565 GN=EC392_04125; PE = 4 SV=1
MSTLSAKTCASDIGDLRRDDMLFLSPTASLHARGCYATLTHPADDGDDLNGVFQRQVRHLFEQAQRDGLDNPLLVGAVPFDKRQPVNLKIPTSYRWIQRDELAERPATNTFPRILRQRQIPDRETFMRMVSAGIDATKRGELNKIVLSRLLDIETEQPLDTLSLLLQLNQQNPWSYNFHLPLADGCLVGASPELLLRKQGMTIASQPLAGSSRRSNDAGEDHRLQQALQSSVKDRYEHQLVIEEMQRALLPRCRSLTVPQAPTLISTPVLWHLATHLQADVIDPRENALSMACLLHPTPALCGTPFQPALDRIGELEPFDRQRFGGIVGWCDAQGNGEWAVTIRCGEVQDNRVRLFAGAGIVPDSQPLSEWQETGVKLSTMLRAFGLQQDREHAA

SEQ ID NO: 94182 - protein, 441 aa, unidentified
  source 1..441: note = Lonsdalea quercina
  REGION 1..441: note = tr|A0A1H3W4M9|A0A1H3W4M9_9GAMM Isochorismate synthase MenF OS=Lonsdalea quercina OX=71657 GN=menF PE=3; SV = 1
MKQLSGLLQRMEQALGASLPDDAGFRTFTLSAERGGDTALTAWLAAQTLYPQFYWQHRRDPEEAAACGAVCTFASASEAEAFLHREDLDDDVRLWGLNAFGYPTLAQAEPLDGYLFLPRITLLRESERVVLRVNLFSAVSLRQDAENALKALRQLATAHPLPPLAATVRLTAHHPEKKQWTDLIAQTLTEIEAGALKKVVLARTTRLTLDRPLAAVPLMAASRAANHDCYHFMLAFTPERAFLGSSPERLYRREGNRLETEALAGTVVNDLDDRRADELAQWLMRDVKNQNENQLVVDDIRQRLSQAATALEVLPLEIIRLRKVQHLRRAIRAELFEAKDRACLQLLQPTAAVAGLPRAAARDYLACYEPFDRGWYAGSAGYLSRQVSEFCVSLRSADVEGDCLTLYAGAGIVAGSDPQQEWQELETKASGLKSLLDGDKS

SEQ ID NO: 94183 - protein, 403 aa, unidentified
  source 1..403: note = Lunatimonas lonarensis
  REGION 1..403: note = tr|R7ZQP3|R7ZQP3_9BACT Isochorismate synthase / Menaquinone-specific isochorismate synthase OS=Lunatimonas lonarensis OX=1232681 GN=ADIS_2885 PE=4 SV=1
MSTVAAKKTVSVVEFLEAIFLSALEGDVQFAVWRKPGTSKIEVVLDSNGNATQVIPHLEQLPSGFILHPFADTKSAYFIPAETYFSFDLEADTAYELPENLVSGFDEHSFTSGETIRQLLKKRISSETGDTKEPTAKEAFLAMVEEAKQEILVGKLFKVVTARTKHCPLPTRFDLVQTFLALCAAYPNSFVNFFRIPGIGTWLGATPELLIRTKGKLFHTMALAGTQRAVGDNPVKNTAWTQKEIEEQALVSRYIVSCFKKIRLREYDEIGPKTSMAGNLLHLKSDFFVDMKATGFPELGTVMLDLLHPTSAVCGMPKETAHQFIETHEGFERGFFAGYLGPVNIGGETSIFVNLRCGQLRGDQVILYAGAGITEDSEPEKEWEETEMKCDIIRRFLLKPELS

SEQ ID NO: 94184 - protein, 395 aa, Luteimonas sp.
  REGION 1..395: note = tr|A0A4Z1R3L2|A0A4Z1R3L2_9GAMM Isochorismate synthase OS=Luteimonas sp. 1626 OX=2508325 GN=E4582_01030; PE = 4 SV=1
MSEGPLSIATDLPASAPWCGPASPGAFRLHTPSERLDAVGCLARLPSGPTDTLGARVDAFFAARRSGPPLLVGALPFDPHADDALYQPERVGAAAPGSRDDGACLRPSAAVAEPSEADYAAAVSRCVARLDTADAPHGLHKVVLARSLRVEAAAPVDPQRLAARLGEDASVTTYVMPLPVAAGEAPAWLVGATPELLVSRRGTAVVSHPLAGSARRWREPARDAAAARALLASGKDHEEHHHVVEAILDTLAPLCSRLHAPVAPSLHATRTMWHLGTRIEGTLKDPRVSSAHLAGLLHPTPAVCGTPRLPALEAIRALEPVDRGFYAGAVGWSDADGDGEWHVSIRCARVQGRVLRLFAGAGIVAGSEPALEVDETAGKFRAMLDALGIDDLRTA

SEQ ID NO: 94185 - protein, 388 aa, unidentified
  source 1..388: note = Luteimonas terrae
  REGION 1..388: note = tr|A0A4V3AP01|A0A4V3AP01_9GAMM Isochorismate synthase OS=Luteimonas terrae OX=1530191 GN=E2F49_06320; PE = 4 SV=1
MSAAPLLEPRDRTGDVASLFRLHAPDRRLATDGIHARLPAGPAATLGQRVATFFSTPRSGPDLLVGALPFDPHADDALYQPARVSAPGTGTLPASLGTLVAAAELPSAGAYADAVARCVAALQAAPNGADALRKVVLARGLRIEGSAPIDPHVLAVKLGSDASVTTYVVPLPVKADEAPAWLVGATPELLVSRRGRTVVSHPLAGSARRTGDAAEDRRRTDALLASGKDLHEHRLVVEAILDGLAPLCSRLQAPPRPSLQATATMLHLATRIIGTLKDPDVSSATLAGVLHPTPAVCGTPRLPALQAIRDLEPFDRGFYAGAVGWTDASGDGDWYVAIRCARVQGNAMHLFAGAGIVADSQPALEVDETAAKFMALRNAIGIDDVRAV

SEQ ID NO: 94186 - protein, 382 aa, Luteococcus japonicus
  REGION 1..382: note = tr|A0A1R4KG59|A0A1R4KG59_9ACTN Isochorismate synthase of siderophore biosynthesis OS=Luteococcus japonicus LSP_Lj1 OX=1255658 GN=FM114_14150 PE=4 SV=1
MFSVLSFTRPGERTLVPGFHLRTPFSVVETPGPVPELFEVSSPRTLSETASQHGHAVVGALSFDCSRAALAAAPDLSVTHGSPGLRVVREEPWPRLVGDAVLHPTPEGYREGVRQVLRAIAEERVVKTVLGRTVQYRFDAPVPAESLTRALARRHPEARTYCCPLPGGDSLVGASPELLVSRHGTTVRSHPLAGSVPRSANPAQDEAAARQLLASTKDLREHAVVVEMIADTLAPYCTRLTVPNQPALVSTRTVWHLGTWLRGELRDPQTSSLELAAALQPTPALCGAPHQPALDLLRGVEGFDREWFGGAVGWNDEHGDGEWTVAIRCARLSGTTATLFAGAGLVAGSDPSAELAETSAKFAALQDVLLGCAGQEHQERIA

SEQ ID NO: 94187 - protein, 352 aa, Lutibacter sp.
  REGION 1..352: note = tr|A0A4Q1IAI2|A0A4Q1IAI2_9FLAO Isochorismate synthase OS=Lutibacter sp. HS1-25 OX=2485000; GN = EC396_16690 PE=4 SV=1
MHFFNKISEVLKSDLPFVVYRKPNEKLVSVLVQSTNKLFYLDTFATNGFVFAPFNKDEEKILFPLTACEQFSLNITDFNELQISEEKTIVENVLDVQDSKLQHLNLVQKTIDFIQQKEADKIVVSRKERLKSSNFNLLNSYKKMLNNYPNAMVYLWFHPKVGCWLGASPERLIHCNKQHFKTMALAGTQAYVDTVEVDWKHKEKEEQQFVTDYILNTINGVVNHIKYTKPYTVKAGNLLHLRTDIYGDLQSENGLEQLIERLHPTPAICGVPKKIANHFIAENEGYNRSFYAGYLGEINLNCETNLYVNLRCMQIVNSEISIYIGGGITAESNAEKEWDETVFKTEVMKKIL

SEQ ID NO: 94188 - protein, 435 aa, Lyngbya aestuarii
  REGION 1..435: note = tr|U7QFP9|U7QFP9_9CYAN Salicylate synthase; OS = Lyngbya aestuarii BL J OX=1348334 GN=M595_4772 PE=4 SV=1
MLTYQERFIPGQRDSLILLQNLLESGLFFDYMMYHQQQEVRIAANALAVISVSLEELSIQSLDQLQFQPIHDPFKQVESAFANLQIENWTAYGYISFDMARFYYPYTKAINQPLLYFFVPETELRITSEGVYIKSLNHLSKLQAICELETASKSYSPTTIPELHFTEKQQYIQKVEQLIQAIQARELQKAIICRSIKFSGELDLLGTYTLGYQRNHSARSYCFQLGEVQGVGFSPEILMEIHADHWIVTNPLAGTRPRGKNLEEDQQLQRELFTDAKEVKEHALSILLVQQEMSGICVENTVKISDFMQVKQYPYVQHLSSHVVGQLQADKTPWDALKALFPAITVSGIEKSQAIAWIDRLEDTPRGIYAGAIGWLNGEGQADFAIPIRSAYQYGNSIHLNAGAGIMGESIPQREYIECGNKMNTILTNLVLKSD

SEQ ID NO: 94189 - protein, 461 aa, unidentified
  source 1..461: note = Lysinibacillus composti
  REGION 1..461: note = tr|A0A3N9UL68|A0A3N9UL68_9BACI Isochorismate synthase OS=Lysinibacillus composti OX=720633; GN = EBB45_03460 PE=4 SV=1
MHQKWFKATEVESSSFNSKASFYIETIEVSRLSALAFFAAGESKYKGQRFFWQNREKTLTIVGLGHAYVLENNKGLNRFNHIEEEWKKLTKNIVKEEREAQPILFGGFTFDPENEHKGEWEGFPEAFFAVATFQLTIQHDKAYVSIHLITDQDNSASIFDSLRQERDYLIHAAQVRELKTYEKPLPTNYHELYKDEYLDSIQKVTGHIKSKEAEKVVIARSLSMEFDDMVTSPQILSHVIHEQPESYLFGLERENLLFFGASPERLVKVVHGQAYSSCVAGSIKRGKTAEEDHALGQILLNDAKNLGEHQYVVEMIVNTFAKNCLEYKVPKHPKLLKIRDIQHLFTPVEGKLSPNATILQLVKSLHPTPALGGVPRQEALAIIRQYEPMNRGLYAAPIGWIDAEGNGEFAVAIRSAALIDHKAYLYAGGGIVADSEPISEYEETLVKFRPMLRALGGEINE

SEQ ID NO: 94190 - protein, 461 aa, unidentified
  source 1..461: note = Lysinibacillus endophyticus
  REGION 1..461: note = tr|A0A494ZAY2|A0A494ZAY2_9BACI Isochorismate synthase OS=Lysinibacillus endophyticus OX=1978490; GN = D8M03_00010 PE=4 SV=1
MHQKWLQSTEVEVGNINRAQTFYIETIEVSRLSALAFFAAGEQKYKGKRFFWQNREKTLTLVGLGHAYVIKNNAGDNRFDQIEEEWRELTKNIIKEESEPQPILFGGFTFDPENTKTGEWDGFPQSLFAVATYQLVIRNDKAYISIHLVTDKANSLQEFDAMRVERDHLIHAAQVKELKTYEKPVMTKYMELKKQDYLQSIEKVTSLIKDKKAEKVVIARSLEMDFAETLSSPQVLSHVINEQPESYLFGLEQYELLFFGASPERLVKVKNGYAYSSCVAGSIKRGKTADEDKQLGDNLLNDSKNLGEHRYVVEMIADTFEKNCTEFKVPKHPKLLKIRDIQHLYTPVEGKLKPNATILQLVKDLHPTPALGGVPREGALSIIRKYETMNRGLYAAPIGWLDAEGNGEFAVAIRSAALIKDKAYLYAGGGIVADSEPVSEYEETLVKFRPMIRALGGQLSE

SEQ ID NO: 94191 - protein, 461 aa, unidentified
  source 1..461: note = Lysinibacillus halotolerans
  REGION 1..461: note = tr|A0A3M8H128|A0A3M8H128_9BACI Isochorismate synthase OS=Lysinibacillus halotolerans OX=1368476; GN = EC501_17535 PE=4 SV=1
MHQKWLQTTEVEVGTVNSTLTFYIETIEVNRLSALAFFAAGEKQYKGQRFFWQNREKTFTLVGLGHAYKIENNANDERFDFIEKEWKALTKNIVKEESEQQPILFGGFTFDPNNMKEGEWNGFPQSYFAIATYQLVIRDDKAYVSIHLVTKNENCIEEFDLLRKERDQLIHAAQVKELKMYDKPVMTNYREVYKEDYLKTIATVTNLIKNNEAEKVVIARTLEMQFDDILTAPQVLSHVISEQPESYLFGLERDKLLFFGASPERLVKVEKGNAFSSCVAGSIKRGKTVEEDNALGESLLADSKNLGEHRYVVDMIAHTFEQNCIQYKVPKQPKLLKIRDIQHLYTPVEGVLKQDATILQLVKHLHPTPALGGVPRQEALSIIRQYESMNRGLYAAPLGWMDAEGNGEFIVAIRSAALKENTAFLYAGGGIVADSEPISEYEETLVKFRPMLRALGGQLHE

SEQ ID NO: 94192 - protein, 461 aa, unidentified
  source 1..461: note = Lysinibacillus mangiferihumi
  REGION 1..461: note = tr|A0A4U2Z0C5|A0A4U2Z0C5_9BACI Isochorismate synthase OS=Lysinibacillus mangiferihumi OX=1130819; GN = FC756_13800 PE=4 SV=1
MQQKWYQATELEVDSLGQNLHFYMETIEVSRLSALAFFAAGEERYKGERFYWQNREKTMTLVGLGHAHTIQNNEKNNRFDAVEAEWKRLTKNCVKGQAELQPILFGGFTFDPQNNVDGEWTDFPEAYFALATYQLVLRDDKAYVSIHLIASAAEADGQLEALRKERNHLIHAAQVKEVKMYAKPEITNYFEPYKDPYLASIDQVTALIKAKKADKVVIARSLALQFKEQVTSPQVLAQIIHEQPESYLFGLEWQDLLFFGASPERLVKVENGRAYSSCVAGSIQRGKTAEEDEAYGQSLLNDPKNGGEHQYVVDMIAETFRKNCVEMKIPDGPRLLKIRDIQHLFTPVEGQLNNEATILQLTKHLHPTPALGGVPRKEAMIAIRKYEPMNRGLYAAPIGWLDAEGNGEFAVAIRSAALLKDKAYLYAGGGIVADSEPQSEYEETLVKFRPMLRALGGQVHE

SEQ ID NO: 94193 - protein, 461 aa, Lysinibacillus sp.
  REGION 1..461: note = tr|A0A432LHP3|A0A432LHP3_9BACI Isochorismate synthase OS=Lysinibacillus sp. SYSU K30002 OX=2498145; GN = EK386_02730 PE=4 SV=1
MHQKWFHTTEVEVGTVNRAQTFYIETIEVSRLSALAFFAAGENKYKGKRFFWQNREKTLTLVGLGHAYIIENNEDNERFDLIEDEWKALTKNIVKEASELQPILFGGFSFDPKNDKKGEWEGFPQSHFAVATYQLVLRNDKAYVSIHLVTENEHSLEEFDRLRTERDHLIHAAQVRELKNYEKPVMTKYDEVNKDKYLQSIDTVTSLIKDNWAQKVVIARSLEMQFAQSVSSPQVLSQVMNEQPESYLFGLERDNLLFFGASPERLVKVENGYGYSSCVAGSIKRGKTAEEDKQLGDSLLQDQKNLGEHRYVVEMIAETFAKNCTQFKVPKHPKLLKIRDIQHLYTPVEGKLSKDATILQLVKHLHPTPALGGVPRMKALAMIRQYESMNRGLYAAPIGWVDSEGNGEFAVAIRSAALVDNCAYLYAGGGIVADSEPNSEYEETLVKFRPMLRALGGQLNE

SEQ ID NO: 94194 - protein, 461 aa, Lysinibacillus sphaericus
  REGION 1..461: note = tr|A0A2S5CWL5|A0A2S5CWL5_LYSSH Salicylate biosynthesis isochorismate synthase OS=Lysinibacillus sphaericus OX=1421 GN=pchA PE=4 SV=1
MQQKWYQATEVEVDSLGQNLHFYMETIEVSRLSALAFYAAGEECYKGERFYWQNREKTMTLVGLGHAHTIQNNEKNNRFDAVEAEWKRLTKNCVKGQVELQPILFGGFTFDPQNNVDGEWTDFPEAYFALATYQLVLRDDKAYISIHLIANAAEADGQLEALRKERNHLIHAAQVKEVKMYAKPEITNYFEPYKDPYLASIDQVTALIKAKKADKVVIARSLALQFKEQVTSPQVLAQIIHEQPESYLFGLEWQDLLFFGASPERLVKVENGRAYSSCVAGSIQRGKTAEEDEAYGQSLLNDPKNGGEHQYVVDMIAETFRKNCVEMKIPDGPRLLKIRDIQHLFTPVEGQLNNEATILQLTKHLHPTPALGGVPRKEAMTAIRKYEPMNRGLYAAPIGWLDAEGNGEFAVAIRSAALLKDKAYLYAGGGIVADSEPQSEYEETLVKFRPMLRALGGQVHE

SEQ ID NO: 94195 - protein, 461 aa, unidentified
  source 1..461: note = Lysinibacillus tabacifolii
  REGION 1..461: note = tr|A0A4U2XRW7|A0A4U2XRW7_9BACI Isochorismate synthase OS=Lysinibacillus tabacifolii OX=1173107; GN = FC748_00040 PE=4 SV=1
MQQKWYQATELEVDSLGQNLHFYMETIEVSRLSALAFFAAGEERYKGERFYWQNREKTMTLVGLGHAHTIQNNEKNNRFDAVEAEWKRLTKNCVKGQAELQPILFGGFTFDPQNNVDGEWTDFPEAYFALATYQFVLRDDKAYVSIHLIASATEADGQLEALRKERNHLIHAAQVKEVKMYAKPEITNYFEPYKDPYLASIDQVTALIKAKKADKVVIARSLALQFKEQVTSPQVLAQIIHEQPESYLFGLEWQDLLFFGASPERLVKVENGRAYSSCVAGSIQRGKTAEEDEAYGQSLLNDPKNGGEHQYVVDMIAETFRKNCVEMKIPDGPRLLKIRDIQHLFTPVEGQLNNEATILQLTKHLHPTPALGGVPRKEAMIAIRKYEPMNRGLYAAPIGWLDAEGNGEFAVAIRSAALLKDKAYLYAGGGIVADSEPQSEYEETLVKFRPMLRALGGQVHE

SEQ ID NO: 94196 - protein, 461 aa, unidentified
  source 1..461: note = Lysinibacillus telephonicus
  REGION 1..461: note = tr|A0A431USK1|A0A431USK1_9BACI Isochorismate synthase OS=Lysinibacillus telephonicus OX=1714840; GN = EKG35_09100 PE=4 SV=1
MHQKWLQTTEVEVGTVNSKLSFYIETIEVNRLSALAFFAAGEKQYKGQRFFWQNREKTFTLVGLGHAYVIENNANNNRFDLVEEEWKELTKNIVKEESEPQPILFGGFTFDPENDKKDVWGDFPQSFFAVATFQLVIRNDNAYVSIHLVTDKEDSLEEFEALRQERDHLIHAAQVREVKMYEKPAMANYLELYKEDYLNSINEVTSLIKQNKAEKVVIARALEMAFSDTLTSPQVLSHVINEQPESYLFGLERDDLLFFGASPERLVKVEDGNAFSSCVAGSIKRGKTAEEDKMLGQSLLNDAKNLGEHRYVVEMIAETFAKNCLDYKVPKNPKLLKIRDIQHLYTPVEGKLTPDATILQLVKHLHPTPALGGVPRKEALAVIRRYESMNRGLYAAPLGWIDAEGNGEFAVAIRSAAQINNKAFLYAGGGIVADSEPTSEYEETLVKFRPMLRALGGQLNE

SEQ ID NO: 94197 - protein, 380 aa, unidentified
  source 1..380: note = Lysinimonas sp.
  REGION 1..380: note = tr|A0A387BCU4|A0A387BCU4_9MICO Isochorismate synthase OS=Lysinimonas sp. 2DFWR-13 OX=2419774; GN = D7I47_07450 PE=4 SV=1
MRRGEGVAGLGEALRLSFTGPDRIARAAETWRRIAAAARVDDPVRTSGSGLIAFGAFTFADDSAFENVLIVPRTIIGRRDGVSWVTEVSVDGDETPAPELAATPLGSEFRLSLQPGAVSPERYLELVADAVSRIRSGGLRKVVLARDLVGHLPEGGDLRRVLVDLALGYPDTWTFAIDGHIGSSPETLVRVNHGKVTARVLAGSIARGADAEADHAAALRLATSTKDLDEHRYAVQSVLDALGPHARSGISASEIPFALKLPNLWHLATNIEGALSDGSSALDLAAALHPTAAVAGTPTAKALEVIRELEPLDRGRYGGPVGWVDAAGDGKWAVSLRSAEIDATGGIRAFAGGGILAASEPEVELAETKLKFRPIVEAFG

SEQ ID NO: 94198 - protein, 414 aa, Lysobacter antibioticus
  REGION 1..414: note = tr|A0A0S2FB60|A0A0S2FB60_9GAMM Isochorismate synthase dhbC OS=Lysobacter antibioticus OX=84531 GN=dhbC; PE = 4 SV=1
MIGETHALTAVESPSHGVRSPATPALLSSYLAHDSLFSSASHQLHARGVLETLVHSIDTDLAGESERLLARVANDSGRLPLMGAVPFSASQASCLWVPSQAAFAAGRARHRGAALSSLPSDQKAAPRVESVPAPAQFKRNVERSLDRIHDGGISKVVMSRSLRIAARVDVPQLLAQLLTRAPGAYTFAMDLAGAAGPKACLIGSSPELLLSKRGARVVSNPLAGSIPRVADAEEDQRRARGLLESAKDRYEHALVVDAVAAALRPYCRDLRVPKTPSLVATPTMWHLSSVVDGELIDPNTSSLRLALALHPTPAVCGYPTEPARGVIHELEGYDRGLFTGLVGWCDAEGDGEWAVTIRCAMVEEDSATVFAGAGIVAGSEPDAELAETTAKLGTMLNAMGLTQAVEASGAEGRA

SEQ ID NO: 94199 - protein, 421 aa, Lysobacter capsici
  REGION 1..421: note = tr|A0A108U5D6|A0A108U5D6_9GAMM Isochorismate synthase of siderophore biosynthesis OS=Lysobacter capsici AZ78 OX=1444315 GN=AZ78_0408 PE=4 SV=1
MIGEAYSLHGVEDLTPAPAPALSAVASTTGAALLSNYQPRDSLFSSSSTQLHARGVLQSLTRSIDDDLAGASQRLLAYVAAETGRLPMLGAVPFASDEPSRMWLPSQAVFAAGRARHRGAALSALNAEQRPMPRVEPVPAPAQFMRNVERSLDRIVEGGISKVVMSRSLRIAARVDVPQLLAQLLARAPGAYTFAMDLAGAGGPQACLIGSSPELLLSKRGARIVSNPLAGSIPRHPDPQEDQRRAQGLLQSAKDLHEHALVIGSVAAALRPYCRELQVPATPSLIATPTMWHLSTRVDGVLIDPSTSSLRLALALHPTPAVCGYPTERAREVIREFEGYERGLFTGLVGWCDNEGDGEWAVTIRCAVVEEECATVYAGAGIVAGSQPRDELAETTAKLGTMLGAMGLTHAAEAGGAQGRA

SEQ ID NO: 94200 - protein, 315 aa, Lysobacter enzymogenes
  REGION 1..315: note = tr|A0A5B7R2X5|A0A5B7R2X5_LYSEN Isochorismate synthase OS=Lysobacter enzymogenes OX=69 GN=FE772_13160; PE = 4 SV=1
MGAGAGRSRPGARHRGAVHGEARHADRIEPNVQPVPAPAQFKRNVERSLQRIHDGGLRKVVMSRSLRIDARVEVAQLLAQLLARAPSAYTFAMDLAGAGGPAACLIGSSPELLLSKRGARIVSNPLAGSIPRSADPHEDRRRAEGLLQSAKDLHEHALVIEDVAAALRPFCRELQVPAAPSLLATPTMWHLSTRVDGVLRDPTTSSLRLALALHPTPAVCGYPTEPARRTIRELEGYDRGLFTGLVGWCDSEGDGEWAVTIRCALVEEHRATVFAGAGIVAGSQPEAELAETTAKLRTMLGAMGLAHVAEAEGRA

SEQ ID NO: 94201 - protein, 451 aa, Lysobacter gummosus
  REGION 1..451: note = tr|A0A0S2GCX1|A0A0S2GCX1_9GAMM Salicylate synthase; OS = Lysobacter gummosus OX=262324 GN=LG3211_4750 PE=4 SV=1
MTQSLKGEGAAMSADRVMRVIGLSGGDGLQIAERLLHALGHDQYFAYERDDRWHIGLGITATLSISPCGGRYEVISKEGMQTGPTNAALASVARQFMAEHSCSGRRVHGLVAFNYAPCVNGQPYTPGTWPLLILMIPRVEIVVTSDIVEICSDDEAAVDEVVRVVSEQTTVSSPHLCPIDTKAGERVYQDIVRAALEEIGSGVYAKIIVSRAVPTQERIDMPASLVLGRRRNTPARTFALKFDSREAVGFSPELVMSVDDGIVSTEPLAGTRSRSDDPRTDARNRDELINDPKEIVEHAISVREAVDELMRICTHGTVVIDDFMSVRNRGSVQHLGSRVSGRLKDNADAWDALDILFPSITATGIPKQAAIAAIARLETVPRELYSGAVLMIEGERRFEAALVLRAAYQDAARSWVQAGAGIIAQSNPLREFTETVEKLGSVAPYLAMEPR

SEQ ID NO: 94202 - protein, 418 aa, unidentified
  source 1..418: note = Lysobacter maris
  REGION 1..418: note = tr|A0A508B773|A0A508B773_9GAMM Isochorismate synthase OS=Lysobacter maris OX=1605891 GN=FKV24_00535; PE = 4 SV=1
MDASSSAATAFADAPAIPHPSSPRISPRPPRDALLDAWRPGDGLFSSPRQQLHCRGVQARLRSAANDGLADAADALLAGCGRDGSDRLPLIGAIPFDRHAPARLWLPQQAVFASGHARHRGSRRPSDRGGDAHALPPARSVPSASDYLAAVAQALARIERGELDKVVMSRCLRLRTRVDVDALLSALLARDPAGYTFAVDAGDDTRAGQLVGTSPELLLRKHGARVTSNPLAGSAPRSVDPDEDAHRAQALLASAKDRHEHALVVDAVATALAPWCRNLEVPATPSLLATPTMWHLSTRIDGTLADASTHALRLALQLHPTPAVCGHPTAAARTAIGELEGYDRDLFTGLVGWCDAHGDGEWAVTIRCALVEAEAATLYAGAGVVAGSTPEAELAETSAKLGTMLAAMGLPPLTEGQP

SEQ ID NO: 94203 - protein, 388 aa, Lysobacter sp.
  REGION 1..388: note = tr|A0A3M8SZU0|A0A3M8SZU0_9GAMM Isochorismate synthase OS=Lysobacter sp. ZS60 OX=1327343 GN=EER27_08455; PE = 4 SV=1
MPNDPLLSAYRARDSLFSSPTSQLHARGVLREVSTAADQGLVDAAALALRQAACDAGRLPLLGAVPFDASEPSRLWIPMQAAFANGGARHRGAGAGHASTAPSTIHVQPYPEPARYLRNVASSLERILDGGLSKVVMSRSVRISAQIDVPQLLQRLLARTSDGYTFAMDLAGAGGPRACLVGSSPELLLSRRGTRVVSNPLAGSIARSEDPIEDQRRARRLLRSAKDRHEHAVVVDAVGAALTPFCRQLKVPAAPSLLATPTMWHLSSRVQGELRDTSTSSLQLALALHPTPAVCGHPTASARQLIREIEGYERGLFTGLVGWCDGDGDGEWAVTIRCALIDDDSATVYAGAGVVEGSRPDAELAETTAKLATMLGAMGLGTALAGRA

SEQ ID NO: 94204 - protein, 434 aa, unidentified
  source 1..434: note = Macrococcus bohemicus
  REGION 1..434: note = tr|A0A4R5XV22|A0A4R5XV22_9STAP Isochorismate synthase OS=Macrococcus bohemicus OX=1903056; GN = EVU91_11205 PE=4 SV=1
MPINQQFESHLTTNKINKIEQFDLGFQLNVAWIMDYFHAFAGERYVFINKDKSFKLIGIGHHSVVTADTIHPILIERQFKAIVQDATYIGNGSQYDLKLFGGFQFDNNESKNFSAYEKSHFIIPKIQIVESNGHASIIFVDQSLDKAQLIEALRHHTGDNVPYNKIISAEDIDLDLFKSNAHKAISMMQEEKLEKVVLSRKRKITMERDIDILPLIDQAMKNHEVSYFALMESGTQTFITKTPEQLVAVQDGILHTNAIAGTMGKSIANAKQKLLYDEKNLYEHKIVVESIKEDLAPFTNEITLKQSPDILENQFFYHLYTPINAKLNRGGLLEVTESLHPTPALGGFPKRAAMHFLAEANEGRGLYGAPLGYVDLNDEGEFIVAIRSMVIQDNTAMLYAGCGIVKSSAVESEVYETEIKFKPMLEMLGVNEDE

SEQ ID NO: 94205 - protein, 410 aa, Macrococcus bovicus
  REGION 1..410: note = tr|A0A4R6C151|A0A4R6C151_9STAP Isochorismate synthase OS=Macrococcus bovicus OX=69968 GN=ERX55_05500; PE = 4 SV=1
MSTGNIQIKEQAGAYESPAELFKAAARYKGERYFYMNKDKSEWLIGLGHAYIIKDESRNPELITEQFQALLDQAEQPHHIRLFGGFQFDAGDSSLFDAFGHSHFIWPKIQIRCQHNQLTYTYTDMTDEEILNWRSDDEIKAPVVQSVANLNEGQFLHNVATAVEAMKAGQFDKVVLSRQKKVVMDAPVDSAWLIERGLQNEEYSYFLLLEEQESTFVSRTPEQLVKVEDHQLSTNAIAGTMAREIDQAAQKLMNDAKNRVEHDIVVRSITADIEPFTSRMNLPDAPEIMTNRFVYHLYTPITAQLEKGNVLSISHALHPTPALGGFPKEAAATFIEQAEGDRGFYGAPMGYVTADGEGEFVVAIRSMLIKENIAVLFAGCGVVEDSVPEAEFDETETKFKPMLQLLGVTE

SEQ ID NO: 94206 - protein, 410 aa, Macrococcus brunensis
  REGION 1..410: note = tr|A0A4R6BFR1|A0A4R6BFR1_9STAP Isochorismate synthase OS=Macrococcus brunensis OX=198483 GN=ERX27_02655; PE = 4 SV=1
MSKGNIQITEQTGAYESPAELFKAAARYKGERYFYMNKDKSEWLIGLGHAYMIKEKSRSPERITEQFQTLLEQTKEPHHIRLFGGFQFDAGNSPLFDEFGHSHFIWPKIQILCQNNQLTYSYTDMTEEEILNWRSVSEVKAPVIQSVSNQNEEQFLRNVATAVEAMKADQFDKVVLSRQKKVVMNESVDSAWLIERGLKNDEYSYFLLMEGQNSIFVSRTPEQLVKVKADQLSTNAIAGTMARGFNHAAQKLLRDAKNLVEHDIVVKSITADIEPFTTCMNVPDSPKIMTNQFVYHLYTPITAKIEKGNVLNISQALHPTPALGGFPKQAAAAFIEQAEGDRGFYGAPMGYVTAEFEGEFIVAIRSMLIKENTAVLFAGCGVVADSIPESELDETETKFKPMLQLLGVTE

SEQ ID NO: 94207 - protein, 424 aa, unidentified
  source 1..424: note = Macrococcus canis
  REGION 1..424: note = tr|A0A1W7AD78|A0A1W7AD78_9STAP Salicylate biosynthesis isochorismate synthase OS=Macrococcus canis; OX = 1855823 GN=pchA PE=4 SV=1
MPVDLTLKAIYQFPYEGVTQEAAIFRHFADYKGERYLYINKDKSLKIIGIGVQSLIAHSTIDPEGVEAAFHNQLADAQVHGDRKLHLKLFGGFYFDEAESTDFDTFSRSHFVIPKIQIIIEEGASWIIFTDAALDRERICSELMSLPSVDVQHNALIHSEDIELETFKTNATEAIQQMQQGAFDKVVLSRKRQLTMTSPIEVEALIDVASRNHELSYTMVMESGHKTFISKTPEQLVAVMDGVIYTNAIAGTMPKTVTDAKALLQSDEKNLHEHHIVVQSIEQDLAPFSQNIIMKDDPEILENQFLYHLYTPIKAKLNNGSTLRVTRALHPTPALGGYPKSEAMAFLESSGEHRGLYGAPVGYVDAQGDGEFIVAIRSMVIEENRALLFAGCGIVEDSEVESEVYETEIKFKPMLQMLGVPQHE

SEQ ID NO: 94208 - protein, 410 aa, Macrococcus carouselicus
  REGION 1..410: note = tr|A0A4R6BRR7|A0A4R6BRR7_9STAP Isochorismate synthase OS=Macrococcus carouselicus OX=69969; GN = ERX40_05555 PE=4 SV=1
MSKEKIQVIERAGLPESPAELFGAAARYKGERYFYMNKDRSEWLMGLGHAFVIKEKRRSPGRITEQYQALLERVEGPHSVRLFGGFQFDDGDSALFSDFGHSHFVWPKIQVICRGHELTYTYTDMTEEEIIDWRQSAETAAPNITAIDNLDEEKFLSNVRTAVAAMNNHLFDKVVLSRQKKVTAENEIDSAWLLQNGLKNHENSYLVLIEQNDKIFVSRTPEQLVKVENQVLSTNAIAGTMSRSVVHAEEKLLGDAKNLGEHAIVVRSIEADIDDFTSEVKMPASPQIMVNNFFYHLYTPIEARISEGDILAVSHALHPTPALGGFPKEKAARFIKEVEGDRGFYGAPIGYITPDFDGEFIVAIRSMLIHRETAVLFAGCGVVKDSVPESELFETEIKFKPMLQLLGVTQ

SEQ ID NO: 94209 - protein, 434 aa, Macrococcus caseolyticus
  REGION 1..434: note = tr|A0A3B0F1H9|A0A3B0F1H9_9STAP Isochorismate synthase OS=Macrococcus caseolyticus OX=69966; GN = D6861_09120 PE=4 SV=1
MISFRKKCFFVPVNLTLKAIYQYPYEGVTHEAAIFRHFAEYKGERYLYINKEKSLKIIGIGVQSLIARSTIDPVGVEAAFHKQTADAQLHGDSKLHLKLFGGFYFDEAESPHFDTFSKSHFIIPKIQIIIEEAASWIIFTDPALDRERICSDLMSLPSVDIQHNALVDSEDVELDKFRLNATEAIQKMQQSAFDKVVLSRKRQLTMTSPIEVETLIDAASRNHELSYTMVMESGSKTFISKTPEQLVAVKDGVIYTNAIAGTMPKTVSDAKDLLQSDEKNLHEHRIVVQSIEQDLAPFSQNIIMKDYPEILENQFLYHLYTPIKAKLNNGSTLRVTRALHPTPALGGYPKIEAMAFLEKAGEHRGLYGAPVGYVDAQGDGEFIVAIRSMVIEDNRAILFAGCGIVEDSEVESEVYETEIKFKPMLQMLGVPHHE

SEQ ID NO: 94210 - protein, 434 aa, unidentified
  source 1..434: note = Macrococcus goetzii
  REGION 1..434: note = tr|A0A4R6C9E5|A0A4R6C9E5_9STAP Isochorismate synthase OS=Macrococcus goetzii OX=1891097 GN=ETI08_11880; PE = 4 SV=1
MPINQQFEMHLTTNKIKKIEQFDLDFQLNVAWIMDYFHAFAGERYVFINKDKSFKLIGIGHHSVLTADTIHPVLIERQFKAIVQDAAYIGNDSQYELKLFGGFQFDNNESKNFSAYEKSHFIIPKIQIVESNGHASIIFVDQSLDKMQLIDALRHHAAEKVQDNKIISAEDIDLDLFKSNAHKAISMMQQDKLEKVVLSRKRKITMARDIDILPLIEQAMKNHEVSYFALIESGAQTFITKTPEQLVAVQDGILHTNAIAGTMGKSIDNAKQKLLDDEKNLYEHKIVVESIKEDLAPFTNEITLKLSPDILENQFFYHLYTPINAKLNRGGLLEVTESLHPTPALGGFPKRAAMHFLAEANEGRGLYGAPLGYVDLNDEGEFIVAIRSMVIQYNTAMLFAGCGIVKSSIVESEVYETEIKFKPMLEMLGVNEDE

SEQ ID NO: 94211 - protein, 410 aa, Macrococcus hajekii
  REGION 1..410: note = tr|A0A4R6BLE7|A0A4R6BLE7_9STAP Isochorismate synthase OS=Macrococcus hajekii OX=198482 GN=ERX37_00475; PE = 4 SV=1
MSKEKIQVIERIGAAASPDQLFNMTADFKGARYFYMNKDRSEWLIGLGHAYIIKEESRSPEKISEAYQALLARVDGDHHVRLFGGFQFDDGTSELFEGFGHSHFIWPKIQILYRNNELLFSYTDMTEEEIDGWYHEHHADRPVIQTISNLDEEKFLNNVRMAVEAMDNQLFDKVVLSRQKKIVAENQIDSSWLIENGLKNLENSYLVLLEEGNKLFVSRTPEQLVKVENNQLSTNAIAGTMSRSIADAEKKLLADGKNLFEHQIVVNSITADIQDFTTGLKIPETPGILANNFFYHLYTPIEAIIEEGDILSVSDALHPTPALGGYPKEEAARFIERVEGDRGFYGAPMGYITPDMDGEFVVAIRSMLVEGNTAVLFAGCGVVKDSIPESELYETEIKFKPMLQLLGVSQ

SEQ ID NO: 94212 - protein, 430 aa, Macrococcus lamae
  REGION 1..430: note = tr|A0A4R6BTL5|A0A4R6BTL5_9STAP Isochorismate synthase OS=Macrococcus lamae OX=198484 GN=ERX29_08620; PE = 4 SV=1
MKEAESEMMEDYTSRRTIYQIQWDKEILPYQLFNLYQEYAGSRYFFMTKEKDEWLLGLGVEKLINVNHRSPSYVTQVFNKMLESCTVTGISPNLIRLFGGFQFDEGNNADFEGFGHSHFIWPKIQVLFKDKCYYLSFTNMETSAVEDFLSKLDRTIATAQLPQVVEHHNVNEELFLANVRRAVGDMSNGLLSKVVLSRRKKVLLASAIDNSTLIRRGFHDHEHSYFVLLEHGARTYVSRTPEQLVKVTGNHLATNAIAGTMSAKFADAKERLLRDHKNLKEHQIVVGSIEDDLKPYTSELTVPAAPDILSNRYFYHLYTPISGTIKNSDILTLTQAMHPTPALGGFPKAEAAEFIQQVEGNRGFYGAPIGYIDAQMDGEFVVAIRSMVLAGNEAVLYAGCGIVQDSRPEEELYETEIKFKPMLQLLGVSQ

SEQ ID NO: 94213 - protein, 431 aa, Macrococcus sp.
  REGION 1..431: note = tr|A0A4Q1AXN3|A0A4Q1AXN3_9STAP Isochorismate synthase OS=Macrococcus sp. DPC7161 OX=2507060; GN = ER639_11110 PE=4 SV=1
MKEVYSVNDHSNVCEPSVHIYKINKILNIYQLYCHFNDKKSVLINKDKSFQWIGIGQYKAIQLDEINPAAVEKTFKGYFKHIDTDLKRHVKLFGGFHFDQLGSSYFKDFDLSHFYIPKVQIEIANGETIVTLIDGSQEELNQIVLAIENLDTLIGNLNITINTPEIASVVDLDLNQFKDNVLKATHLMTTSDLDKVVLSRKKRVQMTHIDPADILYRALTNDEFSYFAMIPSNDAIFITKTPEQLVKLEGQTYVTNAIAGTMDKNMPDAKNVLLNDEKNLMEHQLVTNSIVSDLKQVTEDIVYHHSPIIMENQFFYHLYTPISGKLQNASLLDLAKILHPTPALGGFPKYLSNAFLKEANEERGLYGAPLGYMDLCGDGEFIVSIRSMLIQGNEALMFGGCGIIKDSQVDLEVHETEIKFNPMFKMLGGKL

SEQ ID NO: 94214 - protein, 537 aa, Magnetospirillum sp.
  REGION 1..537: note = tr|A0A522VYJ9|A0A522VYJ9_9PROT Isochorismate synthase OS=Magnetospirillum sp. OX=31872 GN=EPN20_20210; PE = 4 SV=1
MAMSKASYTPNFRSKSQRLNCIISQDRNTLQSSSSPATWGHRITGKAHGGDDGRRYDGALGLTSIKAGHPFVGKTSATMAVIQQAAMMAITLAHTPDRPSDGDLFDALKAGIAAALPALAATGAGRLVSLSLTISADHLDTLEVPGAECLWLAPGLTLHASGKAIRIDGDLGRHFQKIRADWRVLGDGAARPIGFFTFPPPNSPDLPTLWVPQVVIRRDADTATVTFSMRHDGGTVAEMTRRWTAVLRSMLTAPATQRGGGGDICSITACPDARQWAGRVEATTRAIADGRFDKVVLARRFDILMARPPVVADLVRRLAAINPQCRSFALPYRRGSTVASTPEILAAKRGRLVVAHALAGTAKRHDSETDSQAAAARLLASPKERHEHEVVVATIAAQLRSLCETVQCPPRPEVMALRFVQHLWTPISGTLPPDLGLLDVVAQLHPTPAVLGAPREAAARWLDQVGERRDGLYSGVAGWIDADGDGDAAVVLRSAHIEGCGAVLWAGAGIVADSLPEAELAETEMKMATMLEVLRPL

SEQ ID NO: 94215 - protein, 428 aa, unidentified
  source 1..428: note = Mangrovibacter phragmitis
  REGION 1..428: note = tr|A0A1B7L9V8|A0A1B7L9V8_9ENTR Isochorismate synthase MenF OS=Mangrovibacter phragmitis OX=1691903; GN = menF PE=3 SV=1
MELTQAVKALQRALCEELPDTPGVRILSVHLSLADSQDPLCWLNSQTCWPQFYWQHRDGHEEYAVLYALRTFTSLAEGQSFLSRFPEYPELRLWGLNAFNPQQGQLFLPRLTWQRQGTQTRLILNLYSESSLREAAQEAESWLSGLCPATAIPALAARVCEQVHLPEKDQWTGLVTEATQAIGRKRFDKVVLARATDMQLSRPMSPAWLMHASRQHNSHCYHFYMAFDSHKAFLGSSPERLWHRAGRQLSTEALAGTVGRDADDSKADQQSQWLLKDKKNQHENWLVVEDICQRLQAVAGQIDVEPVQVIRLRKVQHLHRAITATLNHADDTACLMQLQPTAAVAGLPRKDALAFIHAHEPFNRGWYAGSAGYLSLASAGFCVALRSALVQYDKVRLYAGAGIVAQSDPAEEWQEIENKVAALRSLFS

SEQ ID NO: 94216 - protein, 428 aa, Mangrovibacter plantisponsor
  REGION 1..428: note = tr|A0A317Q3P0|A0A317Q3P0_9ENTR Isochorismate synthase MenF OS=Mangrovibacter plantisponsor OX=451513; GN = menF PE=3 SV=1
MELTQAVKALQQALRKELPDTPGVRIMSVPLSLAGNQEPLCWLNSQACWPQFYWQHRDGHEEYAVLCALRTFTSLAEGQRFLSCFPEYPELRLWGLNAFDPQHGQLFLPRLTWQRQGSQARLVLNLYSETSLREAAAEAESWLSGLCPAAVIPELAARVCEQVHLPAEVQWLALVTEATQAISRGQFDKVVLARATDVQLTQPMSPAWLMHASRQHNSRCYHFYMAFDSRQAFLGSSPERLWHRAGRQLSTEALAGTVGRDADDSQADQQSQWLLKDKKNQHENWLVVEDICQRLQAVAGQIDVEPVQVIRLRKVQHLHRAITATLNYADDTACLMQLQPTAAVAGLPRKDALAFIYAHEPFNRGWYAGSAGYLSLATSEFCVALRSALVQYNNVRLYAGAGIVAQSNPAEEWLEIENKVAALRSLFS

SEQ ID NO: 94217 - protein, 428 aa, Mangrovibacter sp.
  REGION 1..428: note = tr|A0A071LML2|A0A071LML2_9ENTR Isochorismate synthase MenF OS=Mangrovibacter sp. MFB070 OX=1224318; GN = menF PE=3 SV=1
MELTQAVKALQQALRKELPDTPGVRIMSVPLSLAGNQDPLCWLNSQACWPQFYWQHRDGHEEYAVLCALRTFTSLAEGQRFLSCFPEYPELRLWGLNAFDPQHGQLFLPRLTWQRQGSQARLVLNLYSETSLCEAAAEAELWLSGLCPAAAIPELAARVCEQVHLPAEAQWLALVAEATQAISRGQFGKVVLARATDVQLTQPMSPAWLMHASRQHNSRCYHFYMAFDSRQAFLGSSPERLWHRAGRQLSTEALAGTVGRDADDSQADQQSQWLLKDKKNQHENWLVVEDICQRLQAVAGQIDVEPVQVIRLRKVQHLHRAITATLNYADDTACLMQLQPTAAVAGLPRKDALAFIYAHEPFNRGWYAGSAGYLSLATSEFCVALRSALVQYNNVRLYAGAGIVAQSNPAEEWLEIENKVAALRSLFS

SEQ ID NO: 94218 - protein, 433 aa, Mannheimia granulomatis
  REGION 1..433: note = tr|A0A011P9V2|A0A011P9V2_9PAST Isochorismate synthase MenF OS=Mannheimia granulomatis OX=85402 GN=menF; PE = 3 SV=1
MPIFNQLKQELIKGYTEISHHQGLIAIQASVAYSEENFSLLGWLKAQENHYPHFFLQYRDSAQAIATIGILKQFNTLEAAQTFIEQQNLPLIGGMQFEGNTQFILPQFSLVKNQQNLTACFYFDSDHYQQQAVIFEQFLANFEQVSQLSLTNNTMLSINSASNFEQWKHNIDKAIAAIKEGFFRKVVLANATTLNFELPISCYDLLAESEKTNLGCYHFLWAESAENAFIGSTPERLYQRQGKYFFTEALAGTSAVMPSEIQTELNAQWLLSDPKNIHENQLVVDDIENNLKDCVDHFEVAEATIKRLNNVQHLRRTIQAELKGNMSDRDCLLRIHPTAAVAGLPRQNAIQFLTQNEPFTRHWYAGTLGVMSQRESEFCVTLRSALIARNTITLYAGAGIVEASDPQSEWQEIKRKSQGIAKLLNIDLVVSEI

SEQ ID NO: 94219 - protein, 431 aa, Mannheimia haemolytica
  REGION 1..431: note = tr|A0A3S4XWY8|A0A3S4XWY8_MANHA Isochorismate synthase MenF OS=Mannheimia haemolytica OX=75985 GN=menF; PE = 3 SV=1
MLIFHQLKQELTKSYSKVGREQGLVAIQASMPLLEENIPLLGWLKTQKTSYPHFFLQYRDTDQTIATIGTLRQFHTLETAQSFIQQHHFPLIGGLQFEGNTQFILPQFSLVKNQQNLTACFYFDSDNFEQQAVIFEQFLANFPQITELGLTDNPLVSMSATSHFEQWKANIEKAIVSIEQGDFQKVVLANAMRLQFEQPICAYSLLAQSQKTNLGCYHFLWAESADVAFLGSTPERLYQRQGLRFSTEALAGTAAVTTSEVQTELNAQWLLSDPKNIYENQLVVDDIENQLKDCVTEFAVSEAKIKRLHNVQHLRRQIQATLKPDTLDVDCLNKIHPTAAVAGLPRQKAKGFITENEPFTRHWYAGTLGVMRNEEAEFCVTLRSALISQNSITLYAGAGIVAGSGPHSEWQEIRRKAQGMAKLLNIDLTAL

SEQ ID NO: 94220 - protein, 434 aa, Mannheimia sp.
  REGION 1..434: note = tr|W0Q2K9|W0Q2K9_9PAST Isochorismate synthase MenF; OS = Mannheimia sp. USDA-ARS-USMARC-1261 OX=1432056 GN=menF; PE = 3 SV=1
MSIFNQLKQELIKIYSKVGKGEGLISIQASVPLFEENLPLLGWLKAQNQHYPHFFLQYRDKDETIATIGAIRQFHTLETAQAFIQQYNLPLIGGLQFEGYTQFILPQFTLVKNQQNLTACFYFDSDNMEQQAVVFAQFLANFEHIEKLSLPDNPLQSVAAASSFEQWESNINKAICAIGQGEFQKVVLANAIRLHFENPICSYDLIAQSRQINQGCYHFLWAESAEVAFIGSTPERLYQRKDKQFFTEALAGTAAVTPSETQTELNAQWLLSDPKNIHENQLVVDDIESNLADCVTEFKVSEAKIKRLHNVQHLRRQIQATLKQGVFDSDCLSRIHPTAAVAGLPRPKAKQFITENEPFTRHWYAGTLGVMSNDEAEFCVTLRSALISQNSITLYAGAGIVEASDPQSEWQEIKRKSQGIAKLLNIDLVTKGDL

SEQ ID NO: 94221 - protein, 442 aa, unidentified
  source 1..442: note = Mannheimia succiniciproducens
  REGION 1..442: note = tr|Q65RK8|Q65RK8_MANSM Isochorismate synthase MenF; OS = Mannheimia succiniciproducens (strain MBEL55E); OX = 221988 GN=menF PE=3 SV=1
MFLTMDSLQSLQQQLIQQMDAYQPCKNQPEITALTAKIQLEQNLLAWLKAQQDYPQFYLHCRADSPNEQENHIAAIGQVRTFTTVNHAQTFVRRADFTLVGGMTFNGECDFYLPRLLLRQVDGELTATLFIDSQKDLSVEKQLAGKCLKNFTKSVALEPVVQSVRLVEKKATQAQWCEWVEQALLEIKKGSFTKVVLANESIFSSRQPINAIDFLAESEKKNTGCYHFFFAQKADYAFIGSSPERLYLRNGQYLQTEALAGTAVMSDDEEQNQRQGEWLLKDEKNEYENMLVVEDICGNIESFTQNIEVQSVELKRLRLVQHLRRKIFAKLTALTADEACLNAIHPTAAVAGLPKQNALRFLAKTETFERSWYAGTLGFMNRARAEFCVTLRSAFVEQNRIRVFAGAGIVAGSVPLLEWQEIERKASGLLSLLQNSGEHICQ

SEQ ID NO: 94222 - protein, 434 aa, Mannheimia varigena
  REGION 1..434: note = tr|W0QC10|W0QC10_9PAST Isochorismate synthase MenF; OS = Mannheimia varigena USDA-ARS-USMARC-1296 OX=1433287; GN = menF PE=3 SV=1
MSIFNLLKQELIKSYSNMGKGEGLVTIQASVSLFETDLSLLGWLKAQNQHYPHFFLQYRDKDETIATVGAIRQFHTLETAQAFIQQHNLPLIGGLQFEGYTQFILPQFSLVKNQQNLTACFYFDSDNMEQQAVVFAQFIANFEHIEELSLSDNPLQSVAATSSFEQWESNINKAICAIGQGKFQKVVLANAIRLHFEKPICSYDLIAQSRQINQGCYHFLWAESKEIAFIGSTPERLYHRKDKQLFTEALAGTAAVTPSETQTELNAQWLLSDPKNIHENQLVVDDIENNLADCVAEFDVSEAKIKRLHNVQHLRRQIQARLKQNITDSDCLNRIHPTAAVAGLPRPKAKQFITENEPFTRHWYAGTLGVMSNDEAEFCVTLRSALISQNSITLYAGAGIVEASDPQSEWQEIKRKSQGIAKLLNIDLVTKEDL

SEQ ID NO: 94223 - protein, 376 aa, unidentified
  source 1..376: note = Marinifilaceae bacterium
  REGION 1..376: note = tr|A0A434AY71|A0A434AY71_9BACT Isochorismate synthase OS=Marinifilaceae bacterium T3-2 S1-C OX=2487017; GN = DLK05_02185 PE=4 SV=1
MDSEAVYKEELVIFLSKCLSQNRPFYAFQLPESEEIKIGTQKETKLVSYQHLFELGGKAGFVFAPFHQDEKHLSWFIRSDIFLSEKDITKDSLQVLDALEYNSERRDLNSETHVSSQEEYFEQIKFMIADLQQKKLDKVILSRIQTIDDSGKTNAVDSFLKLSRVYPSAFVFFVVIPSAGTWIGASPETLLIADDSGVKTMALAGTQSLGDRKMEDIQWARKEIEEQAYVSKYIEQILSKHELNSFIRKGPETVRAANIVHLQTSYQLSVVPDFQKLAALVEDLHPTPAVCGLPILQAQKLIRKQENHDREYYAGYLGPIAANGSLSLFVNLRSMKVLKDKMALFVGGGITADSIPEKEWEETCLKAQTLLNVIRK

SEQ ID NO: 94224 - protein, 372 aa, unidentified
  source 1..372: note = Marinilabiliaceae bacterium
  REGION 1..372: note = tr|A0A4V2HX25|A0A4V2HX25_9BACT Isochorismate synthase OS=Marinilabiliaceae bacterium JC017 OX=2234116; GN = DMA11_21850 PE=4 SV=1
MPDLNNDLNLLKPAMVFYREPDAVTTHFISGVYKKLHGGAALDGLLTEEGFVISPFDSRDAVTYVVAPDASGVWEDEMPAEARRLWECCVADGVLLEQEQATTRQQYMTAFERLQSFIQEGTLTKAILSRVHIEKEVALSGALALFQCLCANYPRAFVYLFHVPELGVWMGASPEILFTRKGDRCQTVSLAGTIADQEQAAEKWTAKELDEQAVVTNYIASALQELGIEAVDQQGPFTVQAGKVAHLKTLFEFSVDNFNGSVGALVQRLHPTPAVCGWPREQAFAVIRQLEQHNRLLYAGFIGPVGKNSVNLYVNIRCLRFVTDGVALYLGGGITAGSEVESEWQETEMKAQTLLEVIKNMRNLQAYDETYI

SEQ ID NO: 94225 - protein, 388 aa, Marinomonas mediterranea
  REGION 1..388: note = tr|F2JZU1|F2JZU1_MARM1 Isochorismate synthase; OS = Marinomonas mediterranea (strain ATCC 700492 / JCM 21426 / NBRC 103028 / MMB-1) OX=717774 GN=Marme_2830 PE=4; SV = 1
MDTLVSGFFDSASVTTSMPFLFYSKSSSVRCRGAKSVLECPLTDPTFSRKLDDLFNREKAQGVDNPIVVGAIPFDLAQPCHLMVPQWFTFQSAPPFDMSQFNDTGFKHRVRAHQFVPNHDVFIQCVEQALTRFDDTDLKKVVLSRLLELELDKDVDLTRLMGNVMAQNPNAYHFNIPVKGGVMIGASPELLIRKKDERVYSNPLAGSAKRQDDQALDGAAADALWQSKKDQYEHRLVVDSIRSAISGYVSDLRIPEEPSLVNTPTMWHLSTQIEGCVKESATNTFDLIKAIHPTPAMGGTPTQHAKQAIDEIEPHDRHFFSGLVGWADSKGNGEWAIAIRCAEVNGAFVRLFAGAGVVPDSNPENEWIETGNKMRTMLNAFGIKRDAL

SEQ ID NO: 94226 - protein, 397 aa, Marinomonas posidonica
  REGION 1..397: note = tr|F6CU84|F6CU84_MARPP Isochorismate synthase; OS = Marinomonas posidonica (strain CECT 7376 / NCIMB 14433 / IVIA-Po-181) OX=491952 GN=Mar181_2165 PE=4 SV=1
MDVAFPDYDYDTELLLSSDQHKTDLFLFNSSQNLVRARGVSQKLVTPLSAATFRHDVQNVFDAEKVKGVDNPILVGAIPFDLDQPCQLFAPKWSERVKPFSANFPAFKDKDFSHHITHHAFTPDHNDFVAMIEEALITLRHDDLKKIVLSKTLEMSLDKSVDIPRLLTNIMGQNPNAYHFSVPLDTGILIGASPELLIRKEGNILFSNPLAGSAKRCKDPQEDKRVAQALNQSEKDQYEHRIVVDAIRSALIPMVESMKLEVQPSLISTPTMWHLSTEIEAMLAIDSSLSIFDVIKQLHPTPAMCGTPTGLAHDHIAALEPHQRDFFSGLVGWCDAQGNGEWAIAIRCAEVASNKVRLFAGAGVVPDSCAESEWRETSAKMQTMINAFGIKDFNNDD

SEQ ID NO: 94227 - protein, 355 aa, Marixanthomonas ophiurae
  REGION 1..355: note = tr|A0A3E1Q724|A0A3E1Q724_9FLAO Isochorismate synthase OS=Marixanthomonas ophiurae OX=387659; GN = DZ858_11865 PE=4 SV=1
MNLKILLQKITEHYKNQKPFVLYSHPESDTVEVLLQKDSKKYTSEAFDKQGIVMAPFIYETKAVCIPLQESEHISCEFSKEKIKTKTLDPSFKTLEKEAYMRLVSKALATISHKNTHKVVVSRKKEYSISNTDFSIFVPRLLKLYPTAFRYVWFHPETGLWCGATPETLLVTNGTSFTTMALAGTKKIENQKTPEWTPKEKNEQKVVTDAISNCLQKVTSVLRVSKTYTHEAGSLAHLRTDITGMLKNKKTTLATITAALHPTPAVCGTPLSAALDFINKNEGYDREYYTGFIGSIDDNDSTSCLFVNLRCMKIEDNKASLYVGGGITFDSQPEEEWEETQNKLQTMLQVVQPML

SEQ ID NO: 94228 - protein, 427 aa, unidentified
  source 1..427: note = Marmoricola ginsengisoli
  REGION 1..427: note = tr|A0A3N0CFS0|A0A3N0CFS0_9ACTN Isochorismate synthase OS=Marmoricola ginsengisoli OX=661483; GN = EFK50_10965 PE=4 SV=1
MTSTPSAATPTSLGRLVARSIEVADPGPLLDLLPEDAPTAWLRRGEGIVGWGVAASVRTSGPERFDAAVDWWHQVSASAVVRDELAVPGSGLICLGSFAFADDPGDSVLIVPKVVVGRRGDRTWVTVIGDDEVSPPPDLVAQPEPRAPGEVVFADGSVGGTAWEAVVAQAVQRINAGELEKVVLARDLIASTEAPLDVRWPLRRLGSEYEMCWTFHVDGLFGATPELLVRRERGLVTSRVLAGTIRRTGDDERDLALAATLARSSKDLEEHEYAVRSVADSLAPHCTSMNVPESPFVLHLPNVMHLATDVAGVVPDTDSSTVLELAAALHPSAAVGGTPTDVAVAMISEIEGMDRGRYAGPVGWMDASGDGEFGIALRSAEYGPGPNGTGRVRLFAGCGIVAESDPESELAEAQAKFVPVRDALAGR

SEQ ID NO: 94229 - protein, 430 aa, unidentified
  source 1..430: note = Marmoricola pocheonensis
  REGION 1..430: note = tr|A0A3N0GWI8|A0A3N0GWI8_9ACTN Isochorismate synthase OS=Marmoricola pocheonensis OX=661485; GN = EFL26_03850 PE=4 SV=1
MTSTPRASTQAVAGRLVARTTEITDPGPLLELLPDAAEGAGEDPGLTAWLRRGEGIVGWGVAASIRTTGSGRFDDAVDWWREVAGAAVVRDDLRVPGSGLVCLASFAFADEPGESVLVVPRVVVGRRGDRCWITLIGDDELTPAPTLQRQPEPRAPGNVVFTDGDVDSAEWEAIVARAVERIGSGELEKVVLARDLVATTDEPLDVRWPLRRLGTSYEMCWTFHVDGLFGATPELLVRRERGLVTSRVLAGTIRRTGHDERDLALAATLARSSKDLEEHEYAVRSVAEALAPHCSSMNVPEAPFVLHLPNVMHLATDVAGVVPDTDGSTVLELAAALHPSAAVGGTPTKVAVEMIKEIEGMDRGRYAGPVGWMDAHGDGEFGIALRSAEYSGTRVRLFAGCGIVADSDPEAELAEAQAKFVPVRDALTAR

SEQ ID NO: 94230 - protein, 382 aa, unidentified
  source 1..382: note = Marmoricola solisilvae
  REGION 1..382: note = tr|A0A3N0E0U0|A0A3N0E0U0_9ACTN Isochorismate synthase OS=Marmoricola solisilvae OX=1542737; GN = EFL95_01985 PE=4 SV=1
MTWLRRGEGVITWGVAAECRTSGEARFSDASTWWRNVVRVAAVADEVEVPGSGLICLGSFAFADEPGDSVLVIPRVVVGRRGDRFWVTTIGSAAVETPRLETQDAPEPPVNLVFADGALSGAEWEGVVWEAVLHLNAGELDKVVLARDLIATADAPIDVRWPLRRLGSEYEMCWTFHVDGLFGATPELLVRREKGLVTSRVLAGTIRRTGDDEHDLTLAATLARSSKDLEEHEYAVRSVAEALEPYCTSMNVPETPFVLHLPNVMHLATDVAGVAHDSGASVLELAAALHPSAAVGGTPTKLAVEMIAEIEGMDRGRYAGPVGWMNAHGDGEFGIALRSAEIDGARVRLFAGCGIVAGSDPEAELAEAQAKFVPVRDSLAGA

SEQ ID NO: 94231 - protein, 411 aa, Marmoricola sp.
  REGION 1..411: note = tr|A0A3L8P5P7|A0A3L8P5P7_9ACTN Isochorismate synthase OS=Marmoricola sp. 4Q3S-7 OX=2478913; GN = D9V37_00505 PE=4 SV=1
MRLRARTVEIADPGALLELLPDSHTFAWLRRGEGLVGWGEAARLDTSGADRFLRASDWWRDLVEHADVEDDVAAPGSGLVAFGGFGFADEPGDSALVVPQVVVGRRRGMAWLTVVGDAAEPLPTPHLVGSPTSEIGDTVRFADGALSGAQWESVVADAVRRIQAGDLEKVVLARDLLAETRAPIDVRRPLRRLARGYPMCWTFHVDGWFGATPEMLVRRERGLVTSRVLAGTIRRTGDDAHDLTLAATLARSSKDLEEHEYAVRSVADALGPYCDSMNVPDAPFVLHLPNVMHLATDVTAVVHDSSGANALELAAALHPSAAVGGTPTKTAVRLISEIEGMDRGRYAGPVGWIDATGDGEFGIALRSAHLEGSTVRLFAGCGIVADSDPAAELAEATAKFVPVRDALAARD

SEQ ID NO: 94232 - protein, 402 aa, Massilia sp.
  REGION 1..402: note = tr|A0A430HG99|A0A430HG99_9BURK Isochorismate synthase OS=Massilia sp. SOD OX=2495579 GN=EJB06_23225; PE = 4 SV=1
MNDRLHGHYLSRTSAADLCAHYEAGATLFSSPGHTLLASGKRSILAPQSGAALAGAASTLLRAARRDGEMLPVLIGAVPFLADAPAHLFIPEHVLMATGPANLPSPAPQAAATRARFPRTIAAVPDQAQYRRAVAQAVERIRAGRMEKVVLSRSLTLETEIDVASLLARLGARNAHGYTFAIDMAPEQDGRRTLIGASPELLLSRIGTRVRCHPLAGSIPRSADAQEDQRRAQGLLTSQKDLHEHALVADMVADSLRPFCHSVQVPAVPSLIATPTMWHLGSEVTAELNEPEMTSLALAMALHPTPAVCGHPAAVARSFINEAEGFDRGFFAGLVGWMDANGDGEWAVTLRCADVRAHSATLYAGAGIVAGSDPELEYLETSGKLRTMLRAMGLEAVLEDAA

SEQ ID NO: 94233 - protein, 471 aa, Mastigocladus laminosus
  REGION 1..471: note = tr|A0A4D9CLB3|A0A4D9CLB3_MASLA Isochorismate synthase OS=Mastigocladus laminosus UU774 OX=1594576; GN = BLD44_010905 PE=4 SV=1
MTVSPCAADFFVYNRELYQFLFAVQRKSIKNNSTQVASIALQINLVDPLVVLDKLAQPHQLNFYWENQGKKEAIAAIDAVAKLQIEGKERFTKSEAFIKYCLKNIINFGDTERYFSKPLFFCSFSFFDRNQQESYPFPAATIFLPRWQIAVKDECCILVANFVIHPEINIERILQNLWRKIETIHSSTFYSLHQDFQEPKFSKKSVANPEKFKRSVLSALETIQSTHISKIVLADALDVRSNTTFNLFNSLHNLRQLHPNCYVFSTSNGKGQNFVGASPERLISIHNQQLITDALAGSAARGETPAEDANNADRLLNSEKERHEHSLVIDFITQRLSQLGLLPQILPPRLRQLSNIQHLWTPISAIVPDEVHPLKIVSQLHPTPAVAGTAPDAACAEIRRYESFERGLYAAPLGWVDADGNCEFVVGIRSALIDGDRARLYAGAGIVAGSDPEKELAEIQLKLQALLKALV

SEQ ID NO: 94234 - protein, 146 aa, Medicago truncatula
  REGION 1..146: note = tr|Q2HT71|Q2HT71_MEDTR Anthranilate synthase component I and chorismate binding protein OS=Medicago truncatula OX=3880 GN=MtrDRAFT_AC150777g10v1 PE=4 SV=1
MVRKLLRIQHLFAQLTGRLRSEEDEFEILSSLHPSPAVCGFPTEEAQLLIAETEVFDRGMYAGPVGWFGGGESDFAVGIRSALVEQELGALIYAGTGIDEGSNPYLEWDELELKTSKECLSVNAYIHRKRLLASLLFYFISDSVAK

SEQ ID NO: 94235 - protein, 458 aa, unidentified
  source 1..458: note = Melghiribacillus thermohalophilus
  REGION 1..458: note = tr|A0A4V2V0R0|A0A4V2V0R0_9BACI Isochorismate synthase MenF OS=Melghiribacillus thermohalophilus; OX = 1324956 GN=menF PE=3 SV=1
MVEIEEQLSGLIQKLKRDQRNFMLLSYTEKILFQDPIAFFENGKALFEKRFFWSSADQDFSVVGLGSVARLTGSQDRFMNVEEKWHEILTTIFIENPYTIPGTGPVIMGGFSFHEQEQLDGIWADFEHNEMVLPQIILTNYRGNSYITHQIPIRVEQTAEKIMEQINEHRLHTLKPRSEMRQAECILKQDLNPDAWKDLVKFATDEIKKGSFSKVVLARELRATYDQNVSPASVLMNLVEEQHHSYIYAFESNGTCFVGASPERLVKVEDNCLLSTCLAGTAPRGGTVSEDEKIGQELLKDRKNLQEHAYVVDMIRQAVESCCDEVDIPDGPVLLPLKNLQHLYTPVRGKLKEGKTLLHVVKQLHPTPALGGEPRNEALHFIRQYERLNRGWYAGPVGWMDASGNGEFAVAIRSALLNGNQASLFAGCGIVRDSDPEEEFKETEIKLTPMLSALGGWK

SEQ ID NO: 94236 - protein, 469 aa, unidentified
  source 1..469: note = Melghirimyces algeriensis
  REGION 1..469: note = tr|A0A521F173|A0A521F173_9BACL Isochorismate synthase MenF OS=Melghirimyces algeriensis OX=910412; GN = menF PE=3 SV=1
MSIIKQLNHLAGIQEGVVRSRRKGHSVLVSQTQRIPHLDPLLFFEAGVREGETRNFWADPDRELILVGLGTAWKIELGPEANNRYREVEKRWRLLLRDAVQIPEDGPRGTGPLLMGGFSFDPLQKRTPLWKGFPEAAFTLPRFLLTVYRGTCLLTVNVVVKPGDQAETLAEMLAEEEEKRLGWMQGVSSSMVSLSYHAYEVEPDRWKQSVSQVAQEIQAGKMDKLVLAREIRLESEDAFASSKILNQLWKRQPSSFLFAVEREGACFLGASPERLVKRDGDRLVSTCIAGTTRRGRDWEEDWTFGQELLSDPKNRVEHQVVVEMIREAFQQGCSHVRVPEEPTLYQVRDVQHLFTPVEGRAKLGTTLLSMVEQLHPTPALGGYPREVAMTRIRELEVMDRGWYAAPLGWVDFRGDGEFACGIRSGLIRGQTASLFAGCGIVGDSDPNSEYEETRMKFRPMLSAIGGESR

SEQ ID NO: 94237 - protein, 472 aa, unidentified
  source 1..472: note = Melghirimyces profundicolus
  REGION 1..472: note = tr|A0A2T6C4X1|A0A2T6C4X1_9BACL Isochorismate synthase MenF OS=Melghirimyces profundicolus OX=1242148; GN = menF PE=3 SV=1
MGGTTVSTMKQLDNLSGLKEGAARARRENRPVLVSRTAGIPSLDPLSFFASGARWGARNFWSDPDRELTLVGVGAAWRAEAVPMEDRYRAVEREWEELLANAVREPADPPRGAGPLLLGGFSFDPLRTETPLWEGFSEASFILPRFMLSVRKERCLLTVNARVEPGDDPEEMAEALAEEEEELIRTAATLSVAPSPSSYDAFEVEPERWKESVSEAARHIREENLEKVVLARELRLRSEEPFAAAVILKRLQQRQPGSFLFAMERSDACFLGASPERLVKKDDDRLYSTCLAGTAARGATPEEDRKRGEELLADPKNREEHAVVVHMIAEAFREGCGEVRVPDTPTLYRVRDVQHLFTPVEGRSKPDTTLLAMVRRLHPTPAMGGYPQQAALDRIRETEGMDRGWYAAPLGWLDFRGDGEFICGIRSGLLRGRTASLFAGCGIVGDSDPDSEYEETRMKFRPMLSALGGEGR

SEQ ID NO: 94238 - protein, 507 aa, unidentified
  source 1..507: note = Melghirimyces thermohalophilus
  REGION 1..507: note = tr|A0A1G6LCC3|A0A1G6LCC3_9BACL Isochorismate synthase MenF OS=Melghirimyces thermohalophilus OX=1236220; GN = menF PE=3 SV=1
MCLEKQSLIIDRIDLGAVGSPIGRGCVAPGVERMGGTTVSTMKQLDNLSGLEEGAKRACRSNRPVLVSRTRRAPNLDPLSFFASGAGTQGARNFWSDPGREETLVGLGTAWRTESGPQSKNRYEKVERDWAELIRGALREPADVPRGAGPLLMGGFSFDPIGEHTSLWEGFSDASFILPRFLLTAVRDGVWLTVNAVITPEDDPEEMSQRLAEEEDQLVDAAVQGYIPETHPSYDAVEVEPERWRQAVAQAAREIREGQLEKVVLARELRLHSQETIRPASVLKRLQEQQPHSFLFAVERGDACFVGASPERLVKKEKHHLYSTCLAGTYPRGSDPAADQELGSQLLRDVKNRQEHAVVVNMIVEALREGCTSIQVPEEPVLYKVRDVQHLFTPVEGTAHPDTTLLSIVERLHPTPALGGYPQERALSRIREMEAMDRGWYAAPLGWLDFRGDGEFACGIRSGLLRNKSASLFAGCGIMGDSDPVSEYEETRMKFQPMLLALGGKKR

SEQ ID NO: 94239 - protein, 458 aa, Melissococcus sp.
  REGION 1..458: note = tr|A0A374JJ59|A0A374JJ59_9ENTE Isochorismate synthase OS=Melissococcus sp. OM08-11BH OX=2293110; GN = DXC12_01705 PE=4 SV=1
MFNIPNDVRKLEINKPTLVSWVVNLSDILEAVVPYFYQAKKVFTTRYFWQTPDASFSIVGLGTCKEYVAQDYRDMAISREKLLKNTITNAKHSGTGPVFLGGFPFDKTVDSQKTWQELGDGYLFIPKIMVTQTNDNRFLTFNMIVESSNDLNTQWENIVSLWNTVSQSRQSESPTRQQIQANEIHVPEWLETVELAIDEITSDSDIRKIVLARELFIEATEVFSVNDVLKNCLEQQENTYVFVLEHNENAFIGATPERLLLLQENNISTACVAGSIPRGKTVGEDNQLGSQLLNDMKNQVEHQIVVEAIERDMSQITETLSEKGQPSLLKNRDIQHLFYPFSGEKKADVSFFSAIEQLHPTPALGGQPKELTTKWIREHEPINRGLYGAPIGWSSVILEEGEFAVGIRSALLSGKSATLYAGCGVVADSIPQEELKETRVKFQPMLRAIGGEENVTSK

SEQ ID NO: 94240 - protein, 437 aa, unidentified
  source 1..437: note = Mesocricetibacter intestinalis
  REGION 1..437: note = tr|A0A4R6VBV8|A0A4R6VBV8_9PAST Isochorismate synthase MenF OS=Mesocricetibacter intestinalis OX=1521930; GN = menF PE=3 SV=1
MDNLRSLKARLNTKINAMLCSKNGSELGCLQESIAFSADLLGWLKMQSCYPQFYWRSRNPAQSDSEVIAALGEVRRFEDVRQANLFIQAQPFTLIGGLTFDGKGYFCLPRLLLQQHDNHLRLSLFWDNLQDWERERQALLQVLQGLESCAALSAPEYPIRPLAAKAEAQQWCSWVEKALQYIERGELNKVVLANQTAFVSSRPINPIDLLAESEKCNNGCYHFLFARSAHQAFLGSTPERLYLRRESHLYTEALAGTAAMSEDKEFNRQQGEWLLQDSKNDYENRLVVQDICDNLRPISRQIEVGEVSLKQLRRVQHLRRKISAELNPGYADEACLQAIHPTAAIAGLPRRKALDFLAATETFERGWYAGTLGFMNKSGAEFCVTIRSALIEGNKIAVFAGAGIVSGSEPEQEWREIERKASGLLSLLQKRGEQSCQ

SEQ ID NO: 94241 - protein, 397 aa, Mesorhizobium sp.; identical to SEQ ID NO: 93451
  REGION 1..397: note = tr|A0A4S0VN44|A0A4S0VN44_9RHIZ Isochorismate synthase OS=Mesorhizobium sp. M00.F.Ca.ET.170.01.1.1; OX = 2500524 GN=EN813_003240 PE=4 SV=1

SEQ ID NO: 94242 - protein, 432 aa, unidentified
  source 1..432: note = Metakosakonia sp.
  REGION 1..432: note = tr|A0A348DAR0|A0A348DAR0_9ENTR Isochorismate synthase MenF OS=Metakosakonia sp. MRY16-398 OX=2487150; GN = menF PE=3 SV=1
MLSISVALEQLREKLSGIDANSPGFYVFDVAFALNDAFDPLTFLASQPCFPQFYWQQRSGEDEAAALGQVLRFPSLAEARHFLNDNPEHDLRVWGLNAFDPQQGELFLPRLEWRREGGRASLRLIVLNGNAQQNDVAQARSFIDALVRAKSLPDVQMELVSQYHFPQQSGWEALVTQATQAITRGEMDKVVLARATDYHFSQPVNAAAVMAASRRLNHHCFHFFIAFDPHNAFLGSSPERLWRRRGTSLRTEALAGTVANDTDDTRATELGDWLMNDDKNQRENMLVVEDICQRLRHATSTLDVLPPQIVRLRKVQHLRRCIWTEMHHNDDAQCLTLLQPTAAVAGLPRLAARAFITQHEPFEREWYAGSAGYLSLKQSEFCVALRCAKIRGTTVRLYAGAGIVAGSDPTMEWQEIENKAAGLRSLLIMKHV

SEQ ID NO: 94243 - protein, 396 aa, Methylocystis hirsuta
  REGION 1..396: note = tr|A0A3M9XTF1|A0A3M9XTF1_9RHIZ Isochorismate synthase OS=Methylocystis hirsuta OX=369798 GN=D1O30_04525; PE = 4 SV=1
MNAVSLPPSHSSIEANPTFLFTSPHRSIKAFGVAEKICLSACGAAHSDSFLQTAVQGAINRARQAGQANPIVAGAIPFDIRQPCSLFVPMSYTAFARESLMVEERRSERAPTVLGMRSLPDKDAFKDAVTRAITSFRAGKTSKAVLSRILEIELAQPVDVAAILNALVRQNPNGYHFKAPLGDGAILLGASPELLIRKDGAAIRSNPLAGSAKRRSDPDEDQLASRTLLQSNKDNFEHRLVVDEIQEALEPVCKALTTPAGPALMNTSTMWHLSTLITGELANHRTSALQLACRLHPTPAVCGYPTAESRSLISALEPFDRGVFSGAVGWCDSEGDGEWAVAIRCGTVHDKAIRLFAGAGIVEASDPESEWAETEAKLGTMLRAFGIETEERPACR

SEQ ID NO: 94244 - protein, 396 aa, Methylocystis rosea
  REGION 1..396: note = tr|A0A3G8MC27|A0A3G8MC27_9RHIZ Isochorismate synthase OS=Methylocystis rosea OX=173366 GN=EHO51_17315; PE = 4 SV=1
MNAINLAPSVSTIEANPSFVFTSPHRSLKAFGVAERICLSACGAAHSDSFLQMAVQGAINRARQAGQVNPIVAGAIPFDIRQPCSLFVPMSYTEFVRESLMVEERRSERAPTVLGMRSLPDKDAFKDAVTRAITSFRAGKMSKAVLSRILEIELAQPVDVTAILNALMKQNPSGYHFKAPLGDGAILLGASPELLIQKDGAAIRSNPLAGSAKRRSDPEEDRLASRKLLQSNKDNFEHRLVVDEIQEALEPVCKALTTPTEPALMNTSTMWHLSTLITGELANHHTSALQLACRLHPTPAVCGYPTAESRSLIGALEPFDRGVFSGAVGWCDSEGNGEWAVAIRCGTVHDKAIRLFAGAGIVEASDPESEWAETEAKLGTMLRAFGIETGERPACR

SEQ ID NO: 94245 - protein, 389 aa, Methylomonas sp.
  REGION 1..389: note = tr|A0A2N0V651|A0A2N0V651_9GAMM Isochorismate synthase OS=Methylomonas sp. Kb3 OX=1611544 GN=CWO84_14110; PE = 4 SV=1
MGDQQPTAIELLHRYGAGSSFFLGSPERTLLGSGIRARLTRHPGEPTAAALQRLFADVRQKDDTPAIAVGALPFAPEADPVLFIPQQMATAGRLTRHAIARTKATIRSSVTQERPTPAVYAQQVQQALDLIRQSALKKVVLSRMLEVVGESDVDQAGVLRNLAARNAAGYTFAVDLPTVSGGVRRLIGASPELLLRRKGTQVLANPIAGTEPRSIDPGEDLARSRRLLHSAKDRHEHALVVAAVADTLRPYCRTLEVPPVPELIATPRVWHLSTRICGQLSHYAPSSFDLAIALHPTPAVCGEPRDLARQAIEQLEDFDRGLFTGLVGWCDANGDGEWAVTIRCAEIEANRAKLFAGAGIVADSEPWREVAETSAKFRTLLDALQGDGV

SEQ ID NO: 94246 - protein, 395 aa, Methylosinus sporium
  REGION 1..395: note = tr|A0A549SMU6|A0A549SMU6_METSR Isochorismate synthase OS=Methylosinus sporium OX=428 GN=FM996_14985; PE = 4 SV=1
MDAIVAERPSREISAQAEKPSFLFSSPHFAIEAYGVFERIRTPAVGGGGVDSVLQAAVDAALARARRAGQDHPIVVGAIPFDSRQPSFLFAPKTHRISAPRMATSAPAAKASVPALWYRSVPGQSGFEKAVAQAVANFRDGHARKAVLSRILEIEFAERVDAVAILEILRRQNPAGYHFHAPLPDGGVLLGASPELLIRKIGGSIRSNPLAGSAKRVAEPEEDARVGRCLLQSSKDNFEHRLVIDEIRRLLEPLCAELRIPDEPALMSTPTMWHLSTAISGELADGRLSVLQLASLLHPTPAICGSPTAQARMLIERLEPFDRGFFAGIVGWCDESGDGEWAIAIRCGTVNEMVVRLFAGAGIVEASDPRAEWAETEAKLATMLRAFGVEREIAQ

SEQ ID NO: 94247 - protein, 380 aa, unidentified
  source 1..380: note = Microbacteriaceae bacterium
  REGION 1..380: note = tr|A0A3N7HVI0|A0A3N7HVI0_9MICO Isochorismate synthase OS=Microbacteriaceae bacterium OX=1873462; GN = EAS51_09000 PE=4 SV=1
MRRGEGVAGLGEALRLTFRGPDRIAQAAETWRRIAAAATIDDPVRRSGSGLLAFGAFTFDESSRYESVLIVPRTIVGRRDGVTWITEVAVAGDDTPAPEPTPSALGTEFRLALQPGDVGPELYRDLVAQAVDRIRAGELRKVVLARDLVGHLPEGGDLRRVLTDLALGYPDTWTFAVDGHIGSSPETLVRVSHGKVTARVLAGSIARGADADADHAAALKLATSTKDLDEHRYAVQSVLDALAPHARAGVSASEIPFTLKLPNLWHLATNIEGTLSDVSSALDLAAALHPTAAVAGTPTAKAMDLIRELEPLDRGRYGGPVGWVDADGDGKWAVSLRSAEVAPDGDIRAFAGGGILAASDPDVELAETKLKFRPVVEAFA

SEQ ID NO: 94248 - protein, 421 aa, Microbacterium azadirachtae
  REGION 1..421: note = tr|A0A0F0KZZ3|A0A0F0KZZ3_9MICO Isochorismate synthase DhbC OS=Microbacterium azadirachtae OX=582680; GN = dhbC PE=4 SV=1
MSAGLVVQTREFDLQGDLLGYADPADPRAWLRRGDGIVAVGAETARVVRAARGPESRTSALARAWDDIRASATVDDTVQLPGTGLVAFAALVFDEESSAESVLLVPRTVIGRHGGRTWITHVLDAPASGDTDGSAIPAPTALGPHWAGTLGPGAQTAQGYQASVRAALSAIAEAQYGKVVLARDLVGTVPAGSDLRRLVRALSTEYPDTWAFAVDRLIGASPETLVTVQDGVVTARVLAGTTARGADAVTDARAAAALADSPKDNDEHAFAVRSVVASLAPHTTALDADGGPFILELPNLFHLATDVRARLSDGASALDLAAALHPTAAVAGTPTDAAVAAIRELEPFDRGRYAGPVGWIDARGNGEWAIALRCAQFGVAGSGVPIPLTAYAGAGIVAGSDPEAELLETRVKFRPIVDALA

SEQ ID NO: 94249 - protein, 404 aa, unidentified
  source 1..404: note = Microbacterium enclense
  REGION 1..404: note = tr|A0A3S3LL36|A0A3S3LL36_9MICO Isochorismate synthase OS=Microbacterium enclense OX=993073; GN = D8Y23_07540 PE=4 SV=1
MDDVLDYTPGYDPLFWSRRGESLAGFGDLLTLRYTGAQPGDATIADRWRRIAAAAEVDDPLCLPGTGLVAFGSFVFDPRSERESVLRVPGTIVGRHGGRAWVTRLAFADTPDEPEPDLPPRSPFGPHWSATLGPGRQSAEGYQDAVRQAIDAIRAGEVGKVVLARDIVGTVPAGADRRRLLRALLEGYPDCWVFAVDGLIGASPETLVTVSRGTVTARVLAGTVARGGDADSDVAAAVALTESAKDQEEHRFAVQSVLASLRPHTSALAAGEQPFTLKLPNVWHLATDVEGELSEAASALDLITVLHPTAAVAGTPTAAAMEVIRRLEPFDRGRYAGAVGWIGASGDGEWAIALRCAQIDPAAPSSPTAPITAYAGAGIVADSVPESELLETRVKFRPIVEALA

SEQ ID NO: 94250 - protein, 421 aa, Microbacterium esteraromaticum
  REGION 1..421: note = tr|A0A1R4J1M2|A0A1R4J1M2_9MICO Isochorismate synthase @   Menaquinone-specific isochorismate synthase; OS = Microba  cterium esteraromaticum OX=57043; GN = FM104_05025 PE=4 SV =1
MSSIRLVAQTREIPPVEDLLAHTSPVRPLAWLRRGDGFVAAGEGMAASIRVPAGRGAVRSAIIADAWRELVANAEIDDLIGMPGTGLVALGALTFDEDSAADSLLIIPQTIIGRRDGRSWITRIRDSDAEFAPVADASAYAPHWAGRVGPGAQTPQGYQESVQLALDEIAADAYSKVVLARDLTGTVPGDADLRRLVRALSSGYPDTWTFAVDGLIGASPETLVTVHERTVTARVLAGTTARGADPDADNAASAALASSGKDLDEHEYAVQSVLASLRPHTRTLAASEQPFTLKLPNLFHLATDVEGELDDGASALDLVGAMHPTAAVAGTPTATAVAAIRRIEPFDRGRYAGPVGWIDAAGNGEWAIALRCAQFAETPDSASGARRVTAYAGAGIVAGSDPESELLETRVKFRPLVDALA

SEQ ID NO: 94251 - protein, 421 aa, Microbacterium foliorum
  REGION 1..421: note = tr|A0A4Y5YSP0|A0A4Y5YSP0_9MICO Isochorismate synthase OS=Microbacterium foliorum OX=104336; GN = FIV50_13890 PE=4 SV=1
MSSRLVVETREIDPVEDLLAYADPSRPLAWLRRGDGIVAVGDGVVETIRIPAGAAPMRSAAIAAAWRDLAQDAEIDDELALPGSGLVAFGALTFDEGSSADSVLVVPALVIGRHHGRTWLTRIRSSSTSHPALDPQSEASTIGYGPHWAGTVGPGAQSPQGYQDSVRQALARIADGELSKVVLARDLTGSIPAGSDLRRLVRALSTGYPDTWAFAVDGLIGASPETLVTVQQRTVTARVLAGTIGRGADADADTAASAHLASSTKDLDEHEYAVQSVLASLRPHTRALAASEQPFLLKLPNLFHLATDVEGELADGGSSLDLVGALHPTAAVAGTPTSAAIAAIRELEPFDRGRYAGPVGWVDAAGNGEWAIALRCAQFTPAETAIAVTAYAGAGIVAGSDPESELLETRVKFRPLVDALA

SEQ ID NO: 94252 - protein, 430 aa, Microbacterium ginsengisoli
  REGION 1..430: note = tr|A0A0F0LXQ5|A0A0F0LXQ5_9MICO Isochorismate synthase DhbC OS=Microbacterium ginsengisoli OX=400772; GN = dhbC PE=4 SV=1
MTLPAPPRLVAVTRETIAHEDLLALADPHTPLVWSRRGDGFVGIGRPLIALEASADAATRLASTWRAIADAASVDDEVHAPGTGLLAFGSLAFDEHAEARSRSGATSRLVVPPVVVGRTGGKTWITRITREEASDQGEDVAPIPYGPYWSATLGPGAQSPDDYTRAVAEAVARIGDGELEKVVLARDLVGSVPAGADLRRLVRALQSGYPDTWTFAVGGLIGASPETLVTVHDGTLTARVLAGTAARGADADRDAAAAVALATSQKDLDEHRFAVQSVLGALAGHTRAVTAAETPFTLKLPNVWHLATDVEGDLGHEASALDLVAVLHPTAAVAGTPTASALATIRELEPFDRGRYAGPVGWIDGDGDGEWAIALRCAQFGAESSSPTAEDRDDIPVTAFAGAGIVASSDPEAELLETRVKFRPIVDALA

SEQ ID NO: 94253 - protein, 429 aa, Microbacterium hatanonis
  REGION 1..429: note = tr|A0A5C8HZN7|A0A5C8HZN7_9MICO Isochorismate synthase OS=Microbacterium hatanonis OX=404366; GN = FVP77_00845 PE=4 SV=1
MTPDTLPLPRLRVVTREIDPVEDVLSYTPSYAPAFWSRRDASLAAFGSIHELRAAGGVESPARFVAERWRAIAAAAEIDDPVGLPGTGLIALGSFTFDPRSAKTSTLTVPWIVVGRRGGRSWVTRISHADSVVDDELLGLPARVPYGPHWSATLGPGAMDPDAYQGAVRAALGAIERHEVDKVVLARDLVGTAPVGADLRRLVRSLASGYPDCWIFAVDGLIGASPETLVTVSAGTVTARVLAGTTARGADVDADAAASVALATSPKDQDEHRFAVQSVLASLRPHTSALAAAEQPFTLRLPNVWHLATDVEGVLSDAASSLDLLEALHPTAAVAGTPTRDAVELIHRLEPFDRGRYAGAVGWVDGAGDGEWAIALRCAQFDIDAAPAGSRDAIPLTAYAGAGIVAGSDPESELLETRVKFRPIVEALA

SEQ ID NO: 94254 - protein, 416 aa, Microbacterium hydrocarbonoxydans
  REGION 1..416: note = tr|A0A0M2HQB0|A0A0M2HQB0_9MICO Isochorismate synthase DhbC OS=Microbacterium hydrocarbonoxydans; OX = 273678 GN=dhbC PE=4 SV=1
MSTKLVVETREIDPVEDLLAYADPDQPLAWLRRGDGIVAAGDRIVTAIRVPAGTDAARSAIIASAWRQLAQDADIDDPLGLPGTGLVGFGALAFDEHSIADSVLLVPSAVIGRHRGRSWLTRIRTADSAPSTAPAAKTYGPHWAGTVGPGAQSPQGYQDSVRGALARIADGELSKVVLARDLTGSIPAGSDLRRLVRALSTGYPDTWAFAVDGLIGASPETLVTVQNRTVTARVLAGTIGRGADADADTAASAHLASSTKDLDEHEYAVQSVLASLRPHTRVLAASEQPFLLKLPNLFHLATDVEGELAEGESSLDLVGALHPTAAVAGTPTVAAIAAIRQLEPFDRGRYAGPVGWVDAAGNGEWAIALRCAQFTGGAGEIAVTAYAGAGIVAGSDPESELLETRVKFRPLVDALA

SEQ ID NO: 94255 - protein, 422 aa, Microbacterium ketosireducens
  REGION 1..422: note = tr|A0A0M2H1Z9|A0A0M2H1Z9_9MICO Isochorismate synthase DhbC OS=Microbacterium ketosireducens OX=92835; GN = dhbC PE=4 SV=1
MVETREIDPVDDLISFTDPNTPLAWLRRGDGIVGLGHQVTGIEFGGAHPLPEADPFPSLAEMWRSLCETAEVDDEVGLPGTGLVAFGALAFDRRSAASSRLIVPQTVIGRGRGRSWVTRIRSSAYDGPDPAIATVPYGPYWSATLGPGTLDPEGYQAAVRQGIAAIESGEVQKVVLARDLVGTIPAGSDIRRLARALSTEYPDTWTFAVDGLVGASPETLVTVSHGTVTARVLAGTVPRGADSDGDATASFSLAHSAKDRDEHRFAVQSVLDALAPHVGAVTADAEPFTLELPNLWHLATDVEAELADHATSLDLVAALHPTAAVAGTPTDAAIEAIRRIEPFDRRRYAGPVGWVGADGDGEWAIALRCAQIGADPTRGYAEFSDTIPVVAHAGAGIMAESDPESELLETRVKFRPIVDALA

SEQ ID NO: 94256 - protein, 420 aa, Microbacterium laevaniformans
  REGION 1..420: note = tr|A0A4S2D004|A0A4S2D004_9MICO Isochorismate synthase OS=Microbacterium laevaniformans OX=36807; GN = E5344_13030 PE=4 SV=1
MSSAPLLPPRLRIVSREIAAIDDLLEYADPADPLVWARRGSWLVGVGSALRMEVPAADAATLADRWRAVAAAATVDDHVGVSGSGLIAFGALPFDVQSAATAVLTVPRMTIGTRDGRTWVSWVLPDDGAPEPDEPRAIGYGPHWSAAVGPGALTPEGYQDAVRAGLAAIASGEVSKVVLARELAGTVPAGADLRRLARSLASSYPDTWVYAVHGLIGASPETLVTVSGGQVTARVLAGTVARGAGPDADREAALRLATSAKDLAEHQYAVRSLVDALSPHASALAAAEQPFTLALPNVWHLATDVEATTAPETSALDLLGVLHPTAAVAGTPTAAALAAIRRIEPFDRGRYAGPVGWVDANGDGEWAIALRGAQFDLAAADADGIPFRAHAGAGIVAGSDPEAEMLETRVKFRPIVDALA

SEQ ID NO: 94257 - protein, 424 aa, unidentified
  source 1..424: note = Microbacterium lemovicicum
  REGION 1..424: note = tr|A0A3Q9J429|A0A3Q9J429_9MICO Salicylate biosynthesis isochorismate synthase OS=Microbacterium lemovicicum OX=1072463 GN=pchA PE=4 SV=1
MSSRPAHTAPPRLRSITREIEAVEDVLAYTPGYDPLFWSRRGDAMAGFGSVLSFGARPGVGIAQIAATWRTLSAAASVDDPVGVPGSGLVAFGAFVFDPRSARRNTLIVPDTIVGRRGGRSWVTRIGYVDAEGLEPELPPRTPFGPHWSATLGPGAMTPEGYMNAVADAVEAIRARRLDKVVLARDLVGTIPAGSDLRRLVRELMTGYPDCWTFAVDGTIGASPETLVSVAHGTVTARVLAGTSARGADADADAAASLALATSSKNQDEHRFAVRSLLDTLRPHTSALAAADEPFTLKLPNVWHLATDVEGTLGDASSALDLVQALHPTAAVGGTPRAVAIDEIQRLEPFDRGRYAGAVGWTDAAGDGEWAVALRCAQVGPAVVGAPTIPVVAHAGAGIVVDSDPESELLETRVKFRPIVDALA

SEQ ID NO: 94258 - protein, 398 aa, Microbacterium mitrae
  REGION 1..398: note = tr|A0A5C8HRU7|A0A5C8HRU7_9MICO Isochorismate synthase OS=Microbacterium mitrae OX=664640 GN=FVP60_05200; PE = 4 SV=1
MRVDELLTLTAPDAPLSWWRRGDGFVGFGVAATLTATGPQRTRELARLWREYVATAEVDDAVGVAGSGLVAFGAIAFDDESAAQSTLIVPRVIVGQRGDIAWITTVTPHGAAAQVPVETPFGDYWPATLGPGLLTPEGYQQAVRDGLTAIAEGVVGKVVLARDIVGTIPADADLRRLSRALQAGYPDCWNFAVDGLIGASPETLVTVSKGRLTARVLAGTASRGADADADTAAATALATSQKDQDEHRYAVASVTTALAAHTTALAASEQPFMLKLPNVWHLATDIEATLGESESSLDLVAVLHPTAAVAGTPTAAALQVIRDIEPFDRHRYAGPVGWIDAAGDGEWAIALRCAQFEPADDHIAVTAHAGAGIVAGSDPEKEMLETRVKFRPIIDAIA

SEQ ID NO: 94259 - protein, 416 aa, Microbacterium oleivorans
  REGION 1..416: note = tr|A0A4S3PG38|A0A4S3PG38_9MICO Isochorismate synthase OS=Microbacterium oleivorans OX=273677; GN = E1I21_04180 PE=4 SV=1
MTSTALGAPRLHAVTRRIEELEEPLSYASPDDPMVWSRRGDLFIGVGRAAELPAGAPAAEWWRDVAAAAEIDDKVRMPGSGLIAFGALPFDPANSSASAALTVPRMIIGRRGDTTWVTHVFVDGEDERPQPASITFGPHWSATVGPGACTPDGYQGEVRAGLDAIASGEVAKVVLARDLVGSVPAGSDLRRLVRALTSAYPDTWTFAVDGLIGASPETLVTVSGGTVTARVLAGTAARGADADADTAASLALATSPKDLDEHRYAVQSVLTSLRGHTSALVAEPEPFMLKLPNVWHLATDVEGTLSGRASSLDLVEVLHPTAAVAGTPTQAALEVIRRVEPFDRGRYAGPVGWIDAAGDGEWAIALRCAQFDVHTDVGSDIPLIAHAGAGIVAGSDPETEMLETRVKFRPIVDALA

SEQ ID NO: 94260 - protein, 422 aa, Microbacterium oxydans
  REGION 1..422: note = tr|A0A3Q9J5F7|A0A3Q9J5F7_9MICO Isochorismate synthase DhbC OS=Microbacterium oxydans OX=82380 GN=dhbC; PE = 4 SV=1
MHTPHLVVETREIDAVEDLLAYADPARPLAWLRRGDGIVAVGQTLSEIRPPAHAEASRVTSLASAWRDMAAHAEVSDPMELPGTGLVAFGTIAFDEDSTADSVLVIPTQVIGRHGDRFWRTTIRFAGAAQAGAPEHQVDLVTQPYGPHWAGTVGPGAQTPQGYQDSVRRALTRIADGEVSKVVLARDLTGSIPAGSDLRRLVRALSTGYPDTWAFAVDGLIGASPETLVTVHGGTVTARVLAGTIGRGADADADTAASAHLASSVKDLDEHQYAVQSVLASLRAHTRALAASEQPFLLKLPNLFHLATDVEGELACGETALDLVRALHPTAAVAGTPTPAAIAAIRELEPFDRGRYAGPVGWVDAAGNGEWAIALRCAQFTERAGEIGVTAYAGAGIVAGSDPESELLETRVKFRPLVDALA

SEQ ID NO: 94261 - protein, 420 aa, Microbacterium paludicola
  REGION 1..420: note = tr|A0A4Y9FX33|A0A4Y9FX33_9MICO Isochorismate synthase OS=Microbacterium paludicola OX=300019; GN = E4U02_06055 PE=4 SV=1
MVETREADPVEDPLLWASRSWPLAWQRKGDMLVGAGTEILRLDVTGPDRIARIAASWREIMAAAEVDDEVRVPGTGLVAFGAFAFDDGSAQRSTLTVPSTILGRRGGRHWITRIRNARAAAPDEAPQPSDYGSHWSATLGPGRMDPAAHGDAVREALAAIEAGEVKKVVIARDIAGSVPVDADLRRLVRALASGYPDTWTFAVEGIIGASPETLVTVRGGEVTARVLAGTRPRGADADEDSAIIAELAANPKDVDEHEYAVRSVVDALRPHTSALASAEQPFTLKLPNLWHLATDVEGTLSNGSTALDMVRALHPTAAVAGTPREAAMAAIRRIEPFDRGRYAGPVGWIDGNGDGEWAIALRCAQFGVPGETTDRGWMIDPDGTRPVTAHAGGGIVAGSVPEAELLETRVKFRPIVDALA

SEQ ID NO: 94262 - protein, 449 aa, Microbacterium radiodurans
  REGION 1..449: note = tr|A0A5J5IVC0|A0A5J5IVC0_9MICO Isochorismate synthase OS=Microbacterium radiodurans OX=661398; GN = F6B42_05120 PE=4 SV=1
MVNDSAPAVRLRVITRDIDPIDGVDDLLAVTDPQDPTVWSRRGDVLVARGRAAEFGSVDGADGAHGAREVSAWWRDIVAAAEVDDPVGLPGTGLVAFGALPFDVRADVRRAGPAPTSFFVPRVIVGRRGARSWVTTIVDATSDAQVDAEADAAAAPPERVGFGPHWSATVGPGALTPDAYQRAVRAGIDAIDDGEVEKVVLARDLAGTVPADADLRRLVRALSSSYPDTWAFAVDGLIGASPETLVTVSHGTVTARVLAGTIARGADADADTAASLSLATSAKDLDEHGYAVRSVLEALRPSTSSLVAGEQPFMLKLPNVWHLATDVEGELAGDASSLDLVAALHPTAAVAGTPTVAALDVIRRLEPFDRGRYAGPVGWIDARGDGEWAIALRCAQFHLEARPDAASPTAAAPIPFTAYAGAGIVAASDPESEMLETRVKFRPIVDALA

SEQ ID NO: 94263 - protein, 434 aa, unidentified
  source 1..434: note = Microbacterium rhizomatis
  REGION 1..434: note = tr|A0A5J5J8X1|A0A5J5J8X1_9MICO Isochorismate synthase OS=Microbacterium rhizomatis OX=1631477; GN = F6B43_07825 PE=4 SV=1
MIDAPRLFVETREIEPVDDLLEYADPRQPLAWLRRGEGMVALAGSTAVATLRVDAAPSEASPLSRATRLARAWRDLTAVAEVDDAVGVPGTGLVGFGALAFDDASASPSSIIVPSAIIGRRGGRSWLTRIHAPIEHSPPPLAPAPPLAPAPYGPYWSGTLGPGSLGPEGYQDAVRDALAAIATGEVSKVVLARDLVGTIPAGSDLRRLARALSSEYPDTWTYAMDGIIGASPETLVTVSAGTVTARVLAGTTSRGGDADADAAASVRLATSAKDLDEHRYAVHSVLQSLRPHTSALAASEQPFMLKLPNVWHLATDVEGALSDAASSLDLVAALHPTAAVAGTPTDAALALIARLEPFDRGRYAGPVGWIDASGDGEWAIALRCAQFGSAPARAHAETTRVVAHAGAGIVAGSQPESELIETRVKFRPIVDALA

SEQ ID NO: 94264 - protein, 422 aa, unidentified
  source 1..422: note = Microbacterium saccharophilum
  REGION 1..422: note = tr|A0A5C8HXT3|A0A5C8HXT3_9MICO Isochorismate synthase OS=Microbacterium saccharophilum OX=1213358; GN = FVP74_08255 PE=4 SV=1
MSDPSFSRARLRAVTRQIDAVEDLLEYASPHEPTVWSRRGDMLVGIGSALAFTGRLRPEGTELTRWWHEVTAAAEIDDPVRVPGTGLVAFGALPFDPESAAMASFTVPAVILGRRDGRSWVTRIQQVDGAETPAALPTPTPYGPHWSATVGPGTLTPDGYQDAVRAGLDEIRAGAVSKVVLARDLAGTVPAGSDLRRLVRALAAAYPDTWTFAVDGLIGASPETLVTVSGGTVTARVLAGTVARGADADADTAASVALATSAKDLDEHQYAVQSVLAALRPHTSALVSEEQPFMLKLPNVWHLATDVEGALDAGASALDLLGALHPTAAVAGTPTQTAIELIRRLEPFDRARYAGPVGWIDAHGDGEWAIALRCAQFDLETGRNGRIPFTAHAGAGIVAGSDPEAEMLETRVKFRPIIDALA

SEQ ID NO: 94265 - protein, 411 aa, unidentified
  source 1..411: note = Microbacterium sediminis
  REGION 1..411: note = tr|A0A4P7FCI9|A0A4P7FCI9_9MICO Isochorismate synthase OS=Microbacterium sediminis OX=904291; GN = E3O41_10905 PE=4 SV=1
MPRLVATTREIDPTDDPLLFASSADPIAWLRRGDGLIGAGPELLRLDVGEDGRLDALADMWRAIAQATDVDDPIGLPGTGLVGFGAFAFDETSTHPSTLIVPTTVIGRRGGRAWVTTIGRAEGTVPAPQPHDYGAYWSATLGPGAMDPEAHGAAVRAALEAIRSGELSKVVVARDIAGTIPAGADLRRLVRALASGYPDTWVYAVDGIIGASPETLVTVSGGTVTARVLAGTRPRGADADEDAAITAELAASEKDNAEHDYAVQSVLRSLHPHTSALAAAEQPFMLRLPNLWHLATDVEGTLENGSTALDMVRALHPTAAVAGTPTDAAVAAIRRIEPFDRGRYAGPVGWIDGNGDGEWAIALRCAQFGPVEGDTRTVVAHAGGGIVEGSVAEAELLETRVKFRPIVDALA

SEQ ID NO: 94266 - protein, 423 aa, Microbacterium sp.
  REGION 1..423: note = tr|A0A519GW43|A0A519GW43_9MICO Isochorismate synthase OS=Microbacterium sp. OX=51671 GN=EOO67_09210; PE = 4 SV=1
MSSAPARSPRLHAVTREIEPIEDLLAYADAADPTVWSRRGDMLVGAGGAVLSFRRPHTSGDTASRWWRGIAEAAEIDDPVGLPGTGLVAFGALPFDADSQADAVFTVPRVVLGRRGGRTWITHISPAGERPGETPEPAAYGPHWSATLGPGALTPDGYQVAVRAGLDAIVAEEVAKVVLARDLAGTVPAGSDLRRLVRALATAYPDTWTFAVDGLIGASPETLVTVSGGTVTARVLAGTMARGADADADTAASVTLATSAKDLDEHQFAVQSVLTALRPHTSALVSEEQPFMLKLPNVWHLATDVEGALDGGASALDLVGALHPTAAVAGTPTAAAIGVIRRLEPFDRGRYAGPVGWIDGDGDGEWAIALRCAQFGIAAPTAASGSPVPLTAYAGAGIVAGSDPEAEMLETRVKFRPIVDALA

SEQ ID NO: 94267 - protein, 432 aa, Microbacterium trichothecenolyticum
  REGION 1..432: note = tr|A0A0M2HJF4|A0A0M2HJF4_9MICO Isochorismate synthase DhbC OS=Microbacterium trichothecenolyticum; OX = 69370 GN=dhbC PE=4 SV=1
MTPSHRPPELVVETREIEHIDDLLTYASPDEPLAWLRRGDGIVGIGWLGGYERGPHSAPGVDPATLPSAAETWRQIAATAEIDDPVGLPGTGLVAFGTLVFDERSSATSRLLIPQAVIGRHRGRSWVTRIRRVSAEVDDVIVEPRPYGSYWSATLGPGTLDPAGYQAAVRGAIDAIVRGELEKVVLARDLVGTIPAGADLRRLVRALADDYPDTWTFAVDGLIGASPETLVTAARGVVTARVLAGTIPRGTDAHDDTAASTSLAHSAKDLDEHRYAVQSVLARLGPHVRHLRADPEPFTLKLPNLWHLATDVAGDLADHASALDLVAELHPTAAVAGTPTDAALDLIRRLEPFDRGRYAGPVGWIDGDGNGEWAIALRCAQIGGEPPRNVAEYSATIPVVAHAGAGIVAQSNPDKELLETRVKFRPIVDALA

SEQ ID NO: 94268 - protein, 407 aa, unidentified
  source 1..407: note = Microbispora bryophytorum
  REGION 1..407: note = tr|A0A544XFG2|A0A544XFG2_9ACTN Isochorismate synthase OS=Microbispora bryophytorum OX=1460882; GN = FLX07_25965 PE=4 SV=1
MSVALIRPLVVRTVAVSDPDDLLARLPDAAPYAWIRHGEGLVGWGEAARAAVPAGPGRFDWARGWLSSLFAGALIEDEVGVPGSGPVAFGSFTFDGHAPGTVLVVPRVVLARRDGRAWLTTIGDSAFDLFSPPREPGRIRYADGSLTAAQWEHRVARAVRRIKDGMLDKVVLARDLTAVAERDIDPRVLLDRLAERYPECYTFSVDGLVGATPELLVRHTGQAVESLVLAGTTARGGGPADDAARGAALYASEKDRHEHAYAVASVREALAPLCSTLNVPDEPELLVLPNVQHLASRVTGRLSDGASVLDVVAAMHPTAAVGGTPTGAAIGVIRELEGMDRGGYAGPVGWIDSRGDGEWGIALRCAYVSGRRARLFAGCGIMAESDPAAELAEAQAKLRVMRYALEG

SEQ ID NO: 94269 - protein, 408 aa, unidentified
  source 1..408: note = Microbispora hainanensis
  REGION 1..408: note = tr|A0A544YBL1|A0A544YBL1_9ACTN Isochorismate synthase OS=Microbispora hainanensis OX=568844; GN = FLX08_34395 PE=4 SV=1
MSVALIRPLVVRTVAVSDPDDLLARLPDAAPYAWIRHGEGLVGWGEAARAAVPPGPGRFDWARGWLSSLFAGALIEDEVGVPGSGPVAFGSFTFDGDAQGTVLVVPRVVLARRDGQAWLTTIGGSAFDLATPPQEPGRIRYADGSLTAPEWEHRIARAVRRIKADGMLDKVVLARDLTAVAERDIDPRVLLSRLAERYPECYTFSVDGLVGATPELLVRHTGQEVESLVLAGTTARGGGPAEDAARGAALYASQKDRHEHACAVASVREALAPLCSALDVPDEPELLVLPNVQHLASRVTGRLSDGASVLDVVAAMHPTAAVGGTPTGAALGVIRELEGMDRAGYAGPVGWIDSRGDGEWGIALRCAYVSGRRARLFAGCGIMAGSDPAAELAEAQAKLRVMRYALEG

SEQ ID NO: 94270 - protein, 407 aa, Microbispora sp.
  REGION 1..407: note = tr|A0A5C4VIA8|A0A5C4VIA8_9ACTN Isochorismate synthase OS=Microbispora sp. CR1-09 OX=1712871; GN = FH610_27945 PE=4 SV=1
MSVALIRPLVVRTVAVSDPDDLLARLPDAAPYAWIRHGEGLVGWGEAARAAVPPGPGRFDWARGWLSSLFAGALIEDQVGVPGSGPVAFGSFTFDGDAQGTVLVVPRVVLARRGGRAWLTTIGDSAFDLVSPPREPGRIRYADGSLTAAQWEHRVARAVRRIKDGMLDKVVLARDLTAVAERDIDPRVLLGRLAERYPECYTFSVDGLVGATPELLVRHTGQAVESLVLAGTTARGGGPADDAARGAALHASQKDRHEHACAVASVREALAPLCSALHVPDEPELLVLPNVQHLASRVTGRLSDGASVLDVVAAMHPTAAVGGTPTGAALGVIRELEGMDRAGYAGPVGWIDSRGDGEWGIALRCAYVSGRRARLFAGCGIMAGSDPAAELAEAQAKLRVMRYALEG

SEQ ID NO: 94271 - protein, 407 aa, unidentified
  source 1..407: note = Microbispora tritici
  REGION 1..407: note = tr|A0A5D0PZ60|A0A5D0PZ60_9ACTN Isochorismate synthase OS=Microbispora tritici OX=2604471 GN=FXF59_11405; PE = 4 SV=1
MSVALIQPLVVRTVAVSDPDDLLARLPGAAPYAWIRNGEGLVGWGEAARAMVPPGPGRFDWARGWLSSLFAGALIRDEVGMPGSGPVAFGSFTFDADAPGTVLVVPRVVLARRDGRAWLTTIGDNAFELARPPVEPGRIRYGDGTLTAPQWEHRVARAVSRIRDGGLDKVVLARDLTAVADRDIDIRVLLGRLARSYPECYTFSVDGLVGATPELLVRHTGQAVESLVLAGTTPRGSGPTDDAARAAALYASKKDRHEHACAVASVREALAPLCSTLHVPEEPELLVLPNVQHLASRVTGRLSDGASVLDVVAAMHPTAAVGGTPTGTALGLIRELEGMDRGGYSGPVGWIDAHGDGEWGIALRCAYISGRHARLFAGCGIMAGSDPAKELAEAQAKLRVMQYALEG

SEQ ID NO: 94272 - protein, 407 aa, unidentified
  source 1..407: note = Microbispora triticiradicis
  REGION 1..407: note = tr|A0A372PGI6|A0A372PGI6_9ACTN Isochorismate synthase OS=Microbispora triticiradicis OX=2200763; GN = DI270_006460 PE=4 SV=1
MSVALIQPLVVRTVAVSDPDDLLARLPGAAPYAWIRNGEGLVGWGEAARAMVPPGPGRFDWARGWLSSLFAGALIRDEVGMPGSGPVAFGSFTFDADAPGTVLVVPRVVLARRDGRAWLTTIGDNAFELARPPVEPGRIRYGDGTLTAPQWEHRVARAVSRIRDGGLDKVVLARDLTAVADRDIDIRVLLGRLARSYPECYTFSVDGLVGATPELLVRHTGQAVESLVLAGTTPRGSGPADDAARAAALYASKKDRHEHACAVASVREALAPLCSTLHVPEEPELLVLPNVQHLASRVTGRLSDGASVLDVVAAMHPTAAVGGTPTGTALGLIRELEGMDRGGYSGPVGWIDAHGDGEWGIALRCAYISGRHARLFAGCGIMAGSDPAKELAEAQAKLRVMQYALEG

SEQ ID NO: 94273 - protein, 418 aa, unidentified
  source 1..418: note = Micrococcaceae bacterium
  REGION 1..418: note = tr|A0A358IQV1|A0A358IQV1_9MICC Isochorismate synthase OS=Micrococcaceae bacterium OX=1904863; GN = DEB66_06690 PE=4 SV=1
MVEQLFPRPAAVSRINFSTLQGLKSMNAQLLENHHEETAVEDPSAPTPRTDEATFRFASYGRALIGHGIKATLDAERARRLGLGPAARQLLAERPPGSILAGVVPFDRAADPFLFVPQQVEDLPMRGLTHGGQETSTVAEVVGEYNPQFICAAGAAIDRIKTGTVEKVVLARSLEVFADKEWNPESVWQRLYQQNPAGHSFTIGLPQEEASIVGNSPELIAGVLRGQLTSHPLAGSAPRLTDRTQDQKAAAVLAGSAKNLAEHEFVVRHISTALRSVAKDLIVPSGPDLLPTGQMWHLGTLIRASLYKGLGSLDAALAIHPTPAICGSPTAAAQALISELEPDARGFYGGLVGWMNRDGEGEWALLLRSAVLNGNRATLHAGAGIVADSDPFDEHSETAAKFRTMLCALGVDRAGSSL

SEQ ID NO: 94274 - protein, 415 aa, Micrococcus flavus
  REGION 1..415: note = tr|A0A4Y8WZ01|A0A4Y8WZ01_9MICC Isochorismate synthase OS=Micrococcus flavus OX=384602 GN=E4A47_08505; PE = 4 SV=1
MSASSPSVAALAARASGLPEGAVPAVARVLVWAREGRVRVGVGGWTVLVTGPRRVERLSAIWRAAVAARPDPSAPAHAWVSSVFDDASPAPAVLRVPARILEAGSAGGEPVEVPARMTEEALRAAVFRDACVRLLPDDDVPLTPEDPAAAWDDAGYAAGVREVLDRMASSGGALGKVVVSRTDTVPADEAALWGAVEALRAQYPQTWVFAVGGLVGATPEMLATRRRGEVTSRVLAGSAPRGADAAEDARNREHLATDPRLAEEHRWAARSVVEVLEPVVELEDVDPAPEVLTLPNVHHLSTSVRGRLRSAEGTVLDVVGPLHPTAAVGGIPRDAALAVIRDVEPVDRGRYAGPVGWLDETGDGEIALALRCGQQVPGGVRLQAGGGIVPGAVPEEEVAEVAAKLLPMRRALGLA

SEQ ID NO: 94275 - protein, 417 aa, Micrococcus luteus
  REGION 1..417: note = tr|A0A378NKK9|A0A378NKK9_MICLU Isochorismate synthase dhbC OS=Micrococcus luteus OX=1270 GN=dhbC PE=4; SV = 1
MGAMSVRSLLPDLGTPATGTPEAAVPPFARAVLWAHGDDAWRGEGGWTVLLDGTDRLRRLSALWQAAVAGRPDPTAPLRGWISSTFADDSPEPAVLRIPAELRRATPSGVRDVAQHVDADALAAAVAADRGARLLADGAVPLPADVADRAWDDAGYAAGVRELLTRMADSGGELAKVVISRTMTVPADDADLWRAIGALRREYPQTWVFAVGGLLGATPEVLATRHAGLVGSRVLAGSMPRGADEEEDAALRERLASDPRLAEEHRWAARSVLDALAPVVDLADDDPAPTVLTLPNVHHLATSVRGRLRDGRGTVLDVVAALHPTAAVGGTPTMDAVRVIAEVEPVDRGRYAGPVGWLDQDGDGEIALALRCGQQVPGGVRLQAGGGMVPGAVPEEEVTEIRAKFLPMRRALGVAED

SEQ ID NO: 94276 - protein, 461 aa, Micrococcus lylae
  REGION 1..461: note = tr|A0A1R4J0D8|A0A1R4J0D8_9MICC Menaquinone-specific isochorismate synthase OS=Micrococcus lylae OX=1273; GN = FM125_05480 PE=4 SV=1
MSAPHENLRSLLPSVHADAAFADAVVWVQGEKALVGAGGWTVLLQGKDRLRRISQLWSRSVKATPQTGTLAMLPVPAAEADEPRPQPAQRAWVAGTFTDASDEPAVLRIPTHWTEQSPQGVKLFVQDVSATALRAAVAVDEAAELAPHGHMPLPAADPERAWDDSGYADGVRAVLERLGRPSEGPEATGEILRKVVISRTETVPADEGALWSALDRLREAYPQTWVFAVGGLLGATPEMLATQHDGAVESLVLAGSVPRGSTVQADAAAKAYIAADHRLADEHHWAARSVWEALTPVLQMDDSTFMPHLLTLPNVHHLATRISGQLKAAAGTVLDVVTRMHPTAAVGGTPTPDAVRVIAEVEPVDRGRYGAPVGWVDGSGDGEIALALRCGQAMRAAEGPDRGAGDGVANAEGEPSPDVAVAVRLHAGGGIVPGADPAEEVTEIGVKFQPMRRALGVDVGA

SEQ ID NO: 94277 - protein, 483 aa, Microcoleus sp.
  REGION 1..483: note = tr|K9WC41|K9WC41_9CYAN Isochorismate synthase family protein OS=Microcoleus sp. PCC 7113 OX=1173027; GN = Mic7113_2145 PE=4 SV=1
MPVTPYRTNLFQDRKELHQLLLTGKQQSLVKGCPQIVSISEEIEVLDPLAVLQAIAKPDQLQVYFEKASQREAIAAIDATLCLKTEGTNRFQKAQEFIQTTLDNLLPGGNLNLPFSGPHFFCSFTFFDKKQAVHSPFPAATIFLPRWQISCVQGSCVVVANVEINPQTNLQLLVERLCNQLRRISWYERRVSNVFEIAPHKIIKQAPKNAERFKSSVLSALESIRANQLRKIVLASAIDVLSPKPFNLVDSLDTLRKRHPDCYIFSSSNGKGQNFIGASPERLISIRQHQIEVDALAGSAPRGKTSTEDGAFAYQLLSSEKERREHQFVINFIVEQLSDLGLIPQMLPTPQLLKLSNIQHLWTPIQAQLLGDIHPLEIVAQLHPTPAVAGVPTKMAQEQIRRYETFDRTLYAAPLGWVDYQGNCEFIVGIRSALIESEKPARLFANAYRARLYAGAGIVAGSDPNKEFAEIQLKLQALLKALL

SEQ ID NO: 94278 - protein, 477 aa, Microcoleus vaginatus
  REGION 1..477: note = tr|F5UJ93|F5UJ93_9CYAN Isochorismate synthase; OS = Microcoleus vaginatus FGP-2 OX=756067; GN = MicvaDRAFT_0857 PE=4 SV=1
MTVIPHRANLLQDRNQLHQFLLNCQQSLTEKDRTKIVSISQEIYPLDPLAVLQEISEPCQRHFYFEKRNPIVGKSFAIAALDSAIHLTVAGTERFALAQNFIRSTLANTITIGAERLPFSGPHFFCSFAFFDENIVANSYFPPATIFLPKWQITRQKDSCILVANTVIEKDLNIKSIAENIWQTFDKIESRKYPKLTTAINSSLSFKQIPVNDASQFKTSVKSALELIASKYFSKIVLSQAINVISQTPFSLIDSLNNLRLSYPDCYVFSTSNGKGQTFIGASPERLISIHSNQLLTDALAGSAPRGKTEAGDAKLAQGLLESEKDIREHQVVIDFIVDRLSKLGITPNFSPVPRLLQLSNIQHLWTPITAQIPPDIHLLKILAQLHPTPAVAGVPRDIALEQIRRCESCDRSLYAAPLGWIDRRGNGEFAVGIRSALIDGDRAILYAGAGIVAGSEPEKELAEIQLKLQPLLNALV

SEQ ID NO: 94279 - protein, 469 aa, Microcystis aeruginosa
  REGION 1..469: note = tr|A0A552DRS2|A0A552DRS2_MICAE Isochorismate synthase OS=Microcystis aeruginosa Ma_QC_B_20070730_S2; OX = 2486256 GN=EWV80_10525 PE=4 SV=1
MTSAVPRLSYPDSPIADLRGLYNFILNPQLLAAEKGNRSIVSFCQKISPLDLLEILSRIASSYPTHCYWENPERETAFLGYGIAFTATFHGKQRFLKAQKFIENCQQRIIKIDNYSEITPRIFCSFTFFDSATATPFPSATLTLPKFQIIKKQSEYFFLTNLLITGEKEIENSLEETINNLKIIQNNSSNCRQNPHQDPCSYYIHPTYNFQAAVADVLQSIHAQNFSKIVLAHALDVISPRPFHLVNCLDNLRQRHPDCYTFSLGNGRGDHFIGASPERLLTVHQGQLITDALAGSAPRGENAIEDALFANKLLASEKEQREHRAVSDFINQKLRQIGLNPQNSPSRLLKLSNIQHLWTPIHAKLKPSIHPLEIVAQLHPTPAVAGVPTEIALAQIRHYETFDRSLYAAPLGWIDCHNNSEFIVGIRSALIKGDQARLYAGAGIVAGSDPEKELAEIQLKFQALLKALT

SEQ ID NO: 94280 - protein, 469 aa, Microcystis flosaquae
  REGION 1..469: note = tr|A0A552L329|A0A552L329_9CHRO Isochorismate synthase OS=Microcystis flos-aquae Mf_QC_C_20070823_S10D; OX = 2486236 GN=EWV45_05095 PE=4 SV=1
MTSAVPRLSYPDSPIADLRGLYDFILNPQLLAAEKGNPSIVSFCQKISPLDPLEILSRIAPSYPTHCYWENPEQETAFLGYGIAFTATFHGKQRFLKAQKFIENCQQRIIKIDNYSEITPRIFCSFTFFDSEIATPFPSATLTLPKFQIIKKQSEYFFLTNLLITSEKEIENSLEETINNLKIIQNNSSNCRQNPHQDSCSYYIHPTYNFQAAVADALQSIQAQNLSKIVLAHALDVISPRPFHLVNCLDNLRQRHPDCYTFSLGNGRGDHFIGASPERLLTVHQGQLITDALAGSAPRGENAIEDALFANKLLASEKEQREHRAVSEFINQKLRQIGLNPQNSPSRLLKLSNIQHLWTPIHAKLKPSIHPLEIVAQLHPTPAVAGVPTEIALAQIRHYETFDRSLYAAPLGWIDCQNNSEFIVGIRSALIKGDRARLYAGAGIVAGSDPEKELAEIQLKFQALLKALT

SEQ ID NO: 94281 - protein, 469 aa, unidentified
  source 1..469: note = Microcystis novacekii
  REGION 1..469: note = tr|A0A552JDL2|A0A552JDL2_9CHRO Isochorismate synthase OS=Microcystis novacekii Mn_MB_F_20050700_S1D; OX = 2486266 GN=EWV54_00060 PE=4 SV=1
MNSAVPRLSYPDSPMADLRSLYNFILNPQLLAAEKGNPSIISFCQKIPPVDPLEILSRIAPSYPTHCYWENPQQATAFLGYGIAFTANFHGKQRFLKAQKFIENCQQRIIKIDNYSEITPRIFCSFTFFDSETVTPFPSATLTLPKFQIIKKQSEYFFLTNLLITGEKEIENSLEETINNLKIIQNNSSNCRQNPRQDACSYYIHPTYNFPAAVADALQSIHAQKFSKIVLAHALDVISPRPFHLVNCLDNLRQRHPDCYTFSLGNGRGDHFIGASPERLLTVHQGQLITDALAGSAPRGENAIEDALLANKLLASEKEQREHRAVSDFINQKLRQIGLNPQNSPSRLLKLSNIQHLWTPIHAKLKPTIHPLEIVAQLHPTPAVAGVPTEIALAQIRHYETFDRSLYAAPLGWIDCQNNSEFIVGIRSALIKGDRARLYAGAGIVAGSDPEKELAEIQLKFQALLKALT

SEQ ID NO: 94282 - protein, 469 aa, unidentified
  source 1..469: note = Microcystis panniformis
  REGION 1..469: note = tr|A0A552QA77|A0A552QA77_9CHRO Isochorismate synthase OS=Microcystis panniformis Mp_MB_F_20051200_S9; OX = 2486223 GN=EWV53_02080 PE=4 SV=1
MTSAVPRLSYPDSPIADLRGLYNFILNPQLLAAEKGNPSIISFCQKIPPVDPLEILSRIAPSYPTHCYWENPQQATAFLGYGIAFTANFHGKQRFLKAQKFIENCQHRIIKIDNYSEITPRIFCSFTFFDSETATPFPSANLTLPKFQIIKKQSEYFFLTNLLITGEKEIEKSLEETINNLKIIQNNSSNCRQNPHQDTCSYYIHPTYNFQAAVADALQSIHAQKFSKIVLAHALDVISPRPFHLVNCLDNLRQRHPDCYTFSLGNGRGDHFIGASPERLLTVHQGQLITDALAGSAPRGENAIEDALLANKLLASEKEQREHRAVSDFINQKLRQIGLNPQNSPSRLLKLSNIQHLWTPIHAKLKPSIHPLEIVAQLHPTPAVAGVPTEIALAQIRHYETFDRSLYAAPLGWIDCQNNSEFIVGIRSALIKGDQARLYAGAGIVAGSDPEKELAEIQLKFQALLKALT

SEQ ID NO: 94283 - protein, 469 aa, Microcystis sp.
  REGION 1..469: note = tr|A0A2L2XTX3|A0A2L2XTX3_9CHRO Isochorismate synthase OS=Microcystis sp. 0824 OX=1502726 GN=N0824_03823; PE = 4 SV=1
MTSAVPRLSYPDSPIADLRSLYNFILNPQLLAAEKGNPSIISFCQKISPFDPLEILSRIASSYPTHCYWENPERETAFLGYDIAFAATFHGKQRFLKAQKFIENCQQRIIKIDNYSEITPRIFCSFTFFDSATATPFPSANLTLPKFQIIKKQSEYFFLTNLLITGEEEIENSLEETINNLKIIQNNSSNCRQNHHQDPCSYYIHPTYNFQAAVADALQSIQAQNFSKIVLAHALDVISPRPFHLVNCLDNLRQRHPDCYTFSLGNGRGDHFIGASPERLLTVHQGQLITDALAGSAPRGENALEDALLANKLLASEKEQREHRAVSDFINQKLRQIGLNPQNSPSRLLKLSNIQHLWTPIHAKLKPSIHPLEIVAQLHPTPAVAGVPTEIALAQIRHYETFDRSLYAAPLGWIDCQNNSEFIVGIRSALIKGDRARLYAGAGIVAGSDPEKELAEIQLKFQALLKALT

SEQ ID NO: 94284 - protein, 469 aa, unidentified
  source 1..469: note = Microcystis viridis
  REGION 1..469: note = tr|A0A552I642|A0A552I642_MICVR Isochorismate synthase OS=Microcystis viridis Mv_BB_P_19951000_S68D; OX = 2486270 GN=EWV77_03570 PE=4 SV=1
MTSAVPRLSYPDSPIADLGGLYNFILNPQLLAAEKGNPSIVSFCQKISPLDPLEILSRIASSYPTHYYWENPERETAFLGYGIAFAATFHGKQRFLKAQKFIENCQQRIIKIDNYSEITPRIFCSFTFFDSATATPFPSATLTLPKFQIIKKQSEYFFLTNLLITSEKEIENSLEETINNLKIIQNNSSNCRQNPHWDPCSYYIHPTYNFQAAVADALQSIQAQKFSKIVLAHALDVISPRPFHLVNCLDNLRQRHPDCYTFSLGNGRGDHFIGASPERLLTVHQGQLITDALAGSAPRGENAIEDALFANKLLASEKEQREHRAVSDFINQKLRQIGLNPQNSPSRLLKLSNIQHLWTPIHAKLKPSIHPLEIVAQLHPTPAVAGVPTEIALAQIRHYETFDRSLYAAPLGWIDCQNNSEFIVGIRSALIKGDRARLYAGAGIVAGSDPEKELAEIQLKFQALLKALT

SEQ ID NO: 94285 - protein, 469 aa, unidentified
  source 1..469: note = Microcystis wesenbergii
  REGION 1..469: note = tr|A0A552JSV7|A0A552JSV7_9CHRO Isochorismate synthase OS=Microcystis wesenbergii Mw_QC_S_20081001_S30D; OX = 2486245 GN=EWV75_05860 PE=4 SV=1
MTSAVPRLSYPDSPIADLRSLYNFILNPQLLAAEKGNPSIISFCQKISPLDLLEILSRIASSYPTHCYWENLERETAFLGYGIAFAATFHGKQRFLKAQKFIENCQQRIIKIDNYSEITPRIFCSFTFFDSETATPFPSATLTLPKFQIIKKQSEYFFLTNLLITGEKEIEKSLEETINNLKIIQNNSSNCRQNPRQDPCSYYIHPTYNFQAAVADALQSIHAQKFSKIVLAHALDVISPRPFHLVNCLDNLRQRHPDCYTFSLGNGRGDHFIGASPERLLTVHQGQLITDALAGSAPRGENAIEDALLANKLLASEKEQREHRAVSDFINQKLRQIGLNPQNSPSRLLKLSNIQHLWTPIHAKLKPSIHPLEIVAQLHPTPAVAGVPTEIALAQIRHYETFDRSLYAAPLGWIDCQNNSEFIVGIRSALIKGDRARLYAGAGIVAGSDPEKELAEIQLKFQALLKALT

SEQ ID NO: 94286 - protein, 413 aa, Microlunatus phosphovorus
  REGION 1..413: note = tr|F5XI89|F5XI89_MICPN Isochorismate synthase; OS = Microlunatus phosphovorus (strain ATCC 700054 / DSM 10555 / JCM 9379 / NBRC 101784 / NCIMB 13414 / VKM Ac-1990 / NM- 1) OX=1032480 GN=dhbC PE=4 SV=1
MTATVPFATEPFAERLEPAVQPAIPPGMPLVFGSTDRLLQGRTTDRHWWSARSNDTAYADRIIADLQAESRPDPGASPATAIGTLSFRPDAPALFFPLAAADRAQSVPARLPMRRSPVQLLGARELPDPGGYLENVNQAIARLRGGQNAAKVVLGRWLDLETATPLDPLAVLGSLATTSRGAVRLFAVPAPAVPEGDSEPAILLGASPELLVSRRGRLVRSTPMAGSVPRSSDPATDALRAHALLDSVKDGDEHRYVADAVAAALRPLCDGLVVDGPKLMRTDTVWHLATEIHGRLSDPNLDLSALHLAQLLQPTPAVGGTPTDWALDVIAELEGARSCVAGAVGWVDAAGDGSYAVGIRSGLLSGRRLRLFAGAGIVAASDPESELMETEAKLATMLGGLGLSTAAVKGMIR

SEQ ID NO: 94287 - protein, 466 aa, Microlunatus sp.
  REGION 1..466: note = tr|A0A516Q6H4|A0A516Q6H4_9ACTN Isochorismate synthase OS=Microlunatus sp. KUDC0627 OX=2596828; GN = FOE78_22755 PE=4 SV=1
MANAVCRGQSITGSRERRISHAGGVLAERSRATLSRVSTNLSAGGAVDRPRLHVATEEIPDPGRLSGLLPEPGALAWIRRGEGMIAFGEVARHKATSIAEAEQWWRETSAQVVVDRGLDGDEPAGAGFVAFGSFCFDHDNTPSESVLIIPQVVIGRRGGRAWRTTISNVGGDDWPSEDGPAAGAGALPVQSPGAVSFADGKLSGPEWESMIGETVRRINAGKLGKVVMARELLALAANPIDPRWLVARLAADYPACWTYHVDGLVGATPEMLIRRESGLATSRVLAGTIRRSDDADHDLALAAALSQSSKDLQEHEYAVDSVARALAPYCSGMNVPDAPYVLELPNVLHLATDVTAVAGPDASSLAMAAALHPSAAVCGTPTDAARATIAELEQLDRNRYTGPVGWIDADGDGEWAIALRCGRIDPDDPRQIRLYAGCGIVAESDPAAELAESVAKLVPMRDALGS

SEQ ID NO: 94288 - protein, 523 aa, Micromonospora sp.
  REGION 1..523: note = tr|A0A4R4QZV4|A0A4R4QZV4_9ACTN Isochorismate synthase OS=Micromonospora sp. KC213 OX=2530378; GN = E1166_09690 PE=4 SV=1
MKDADMMTTAAARTAAAPPSRLDPMTDPADVRRAFAAAHDAARRHGRPVLVAWARPLPRVEPRALLRRADRLSGRVFYWTSRWTGVESLGVGSSLDLSAEGADRFAVVRRAWRRYTRGLVTGGSGIAGRAGFPLLVGGFAFQPGRWHPTGGVPDSLTWCPAAQVVRLGDGSTHLALTARLAADADPTALADARLELAAQLLAETDEQPLPDPAVDSPPRLVVRFDVPDAEQWRRAVGAAVEEIHRGDLTKVVLARQVVLHADQPFAVPAAVDRLAEGFSEGAVFAARFAGYWFLGGTPECLVRVAHGEVTAHSLAGSAARGTTAAADAAGAQSLLDNVKTRHEQSVVTDFVARVLSDVCVDVRASARPGILRLGNVQHLVGTVTAAVPAHRGVGLLDLVERLHPTPAVGGYPRRAALRWIARNEPFDRGWYAAPVGWLDAAQDGEMAVAIRSALVSGDRAALFAGCGIVAGSRPDDEYAETDLKLRPMLTALDAVLDGSAASGPVRSPDAVQDAAAPARWDAA

SEQ ID NO: 94289 - protein, 374 aa, unidentified
  source 1..374: note = Micromonosporaceae bacterium
  REGION 1..374: note = tr|A0A3D4WT77|A0A3D4WT77_9ACTN Isochorismate synthase OS=Micromonosporaceae bacterium OX=1873464; GN = DGT23_14450 PE=4 SV=1
MSFYLSTGKSALQTEGVYFAVPPSMRPDSLADLPARTHAVLGLAHAAGQPDPIVVGAIPFDSRAEARLVVPLRRSWSRGGDDTLKSGESPTTTPRSIRVTTAVPSEADYARSVGEAVDRLRAKDFEKVVLARSLRLTGADPLDARQLLARLAEANPGSHVFAVDLGDERTLIGASPELLLSRFGSDVTTHPLAGSTPRSADPIQDKQRAEALLKSGKDLREHAYVVEAITATLSPLCKTVIVPSGPSLVATPTMWHLGTRITAEVADPDDPAVSALALATALHPTPAVCGSPADKAREAIAEYEPFDRGFYAGMVGWGDLRGDGEWAVTIRCGVVDGSSLTLYAGAGVVADSDPQAELAETSAKFRTLLEVLKG

SEQ ID NO: 94290 - protein, 422 aa, Micropruina glycogenica
  REGION 1..422: note = tr|A0A2N9JDB9|A0A2N9JDB9_9ACTN Menaquinone-specific isochorismate synthase OS=Micropruina glycogenica OX=75385; GN = menF PE=4 SV=1
MLEKYLVDGSSVAWIRHGEGMVGLGCYACTDVTSPAEADAWWSTLVEGLDHHSQMPGVAGSGPLAFGSFTFDPDHTEAVSRLIVPKVIIGRRQGQAWLTVLGDGVSPVEIPPLVELVETQLVEQVETSPLVELVEALTAARPTAPRAPRSVRIEVDEAAQARWKERVAEAVRRIETNGLEKVVLARSVTARASEPIDARHLVDTLARDYPSCWTYCIDGLVGASPEMLIRRERGLATSRILAGTIRRSGSDETDLKLASALARSSKNLGEHELAVASVAESLAPLCSGMNVPESPYVLELPNVLHLATDVTAVAHKKAGALRLAAALHPSAAVCGTPTSVARAAIAELEGLDRGRYSGPVGWIDARGDGEWAIALRCGIIDADDPRQIRLFAGCGIVEGSDPDEELAETQAKLVPMVNALLG

SEQ ID NO: 94291 - protein, 439 aa, unidentified
  source 1..439: note = Unknown
  REGION 1..439: note = tr|A0A1J5QZ09|A0A1J5QZ09_9ZZZZ Isochorismate synthase DhbC OS=mine drainage metagenome OX=410659; GN = dhbC_1 PE=4 SV=1
MNAQPAWSSDDVPRPLLVRTVAIDSLPTGADGLLDLVPRDAPLAWVRRGDGLVGWGEALRITTAGADRFADAERAWHEVLAHSLVRDEVGLPGTGPVAFGSFAFDASSDAGGVLVVPRVVVGRRGGRTWLTTIESGAVLSPGPTLDTVLDRREPVTAPGDVTYTDGAVSAAGWMEVVARGVAAIRAGTVDKVVLARDVVATTAEPVDVRWVLGRLAVDYPSCWTFSVDGMLGATPELLVRSEKGLVTSRVLAGTIRRTGDDDADLGRAAILAHSSKDLEEHEYAVTSVADALAPFCSSTNVPDVPFVLTLPNVLHLASDVTGVLAAGRPGEPAPSSLSLAAALHPTAAVCGTPTAAARALILQIEGMERARYAGPVGWFGADGDGEWGIALRSAEVDPTDPHTLRLFAGCGIVAASDPAAELAESEAKLVPMRHALASD

SEQ ID NO: 94292 - protein, 434 aa, Miniimonas arenae
  REGION 1..434: note = tr|A0A5C5B9Z2|A0A5C5B9Z2_9MICO Isochorismate synthase OS=Miniimonas arenae OX=676201 GN=FH969_09510; PE = 4 SV=1
MSHAALTDTQPRTLPALTVTTTAITDPVDLLALLPSRHGVAAWLRRGEGFVAWGEAARYDARGPARMRGADVWLHALARTAVVHDAVRLPGSGLLAVGSFAFDDDDPAGGALVVPRVVVGRRTTPTGVRAWVTTIDPDGAPPLPLDAPAEPVVAPRDVHWSAGTTSPEEWKARVAGAVARIRAGEVAKLVLARDAWATSADPLDVRCLLDRFQAAYPSTWTFAVDGLVGATPELLVRRERGLVASRVLAGTIRRTGDDASDLLRAAELARSSKDLEEHEFAVASLAEALTPFVASANVPDSPSVLHLPNVMHLATDVTGALAHDGDGVRPSALVLADALHPTAAVGGTPTDVAVRLVREIEGMDRGRYAGPVGWLGADGDGEFCIALRCGAIDPADERRIRLFAGCGIVAASDPGAELDETEAKLEPVRQALLG

SEQ ID NO: 94293 - protein, 393 aa, unidentified
  source 1..393: note = Mixta sp.
  REGION 1..393: note = tr|A0A506VBI7|A0A506VBI7_9GAMM Isochorismate synthase OS=Mixta sp. BIT-26 OX=2562439 GN=FKM52_08825; PE = 4 SV=1
MSGIANAPRITLRQPLHPEDTLFLSPHKSLLARGRIASLTEPAGDGHLASSTFQLRLQQLFEQARHAGVENPIVVGAIPFDKSQPSALYAPAEYHWLDRTAIAAAPAAAQTLAQGARRLQPDHDEFCRMVSAALRQLKRDELQKVVLSRLLHIELPQPQSALRLWQRLNRQNPASYNFHLPLADGVLIGASPELLLRKRGERIDSMPLAGSARRSADAAQDMRLRAALLASRKDRHEHQIVADAIRRQLAERCRSLTLPEPELISTPTLWHLATRVQGCVRHPQENALSLACLLHPTPALCGAPCRHAHALIQRLEPFRRGWFGGIVGWCNAQGDGEWVVTIRCGHIQPQRITLFAGAGIVPDSQPENEWYETGVKLGTMLQALGCAQLQEAS

SEQ ID NO: 94294 - protein, 434 aa, Mobiluncus curtisii
  REGION 1..434: note = tr|A0A2X2YYI6|A0A2X2YYI6_9ACTO Isochorismate synthase entC OS=Mobiluncus curtisii OX=2051 GN=entC PE=4; SV = 1
MLFVHTRALDRDLSPELFPMDAAALPTNGFFFASPPAQGAPLTLAAPGLGDIPGQDFAPAWHWEDGSDLDRAGAAWYLVGRHAQVFDAVQRRGTGPVAFASFGFNSAATPVFVLPSFLVGSDAQGAWITVAYQAESVDEPRADRLYRTALAWIKNFPHRQRQDALQTQPSAVVGKTSYQENVAAAVRAIREGKAEKIVMARPARFEFAGEAGAERARAAGGALASRLRERYPTCWIFNVGGLVGATPEMLLDAAAGRAHSRVLAGTATPGEDVDLAHSAKNLAEHQVALRSVAEPLRRVDPDLEASGPYLLQLPNLTHLATDLHLRVPAGKTLLHLVAQFHPTAAVCGLPREFARTFISRFEADRGRYAGPVGWVDAQGGGQLALALRCAQLDALGVEAWVGAGIMADSDPETEWQETGAKLAPIRDCLNLSAD

SEQ ID NO: 94295 - protein, 434 aa, unidentified
  source 1..434: note = Mobiluncus holmesii
  REGION 1..434: note = tr|E6M4R4|E6M4R4_9ACTO Isochorismate synthase; OS = Mobiluncus holmesii ATCC 35242 OX=887899; GN = HMPREF0576_1304 PE=4 SV=1
MLFVHTRALDRDLSPELFPMDAAALPTDGFFFASPPAQGAPLTLAAPGLGDIPGQDFAPAWHWEDGSDLDRAGAAWYLVGRHAQVFDAVQRRGTGPVAFASFGFNSAATPVFVLPSFLVGSDDQGAWITVAYQAESVNEPRADRLYRAAMSWIKNFPHRQRQDALQTQPSAVVGKTSYQENVAAAVRAIREGKAEKIVMARPARFEFAGEAGAERARAAGGALTSRLRERYPTCWIFNVGGLVGATPEMLLEAAAGRAHSRVLAGTATPGEDVDLAHSAKNLAEHQVALRSVAEPLRRVDPDLEASGPYLLQLPNLTHLATDLHLRVPAGKTLLHLVAQFHPTAAVCGLPREFARTFISRFEADRGRYAGPVGWVDAHGGGQLALALRCAQLDALGVEAWVGAGIMADSDPETEWRETGAKLAPIRDCLDLSAD

SEQ ID NO: 94296 - protein, 547 aa, Mobiluncus mulieris
  REGION 1..547: note = tr|A0A378P9X5|A0A378P9X5_9ACTO Isochorismate synthase entC OS=Mobiluncus mulieris OX=2052 GN=entC PE=4; SV = 1
MLFVSTCPVPVRPLPATDFYFSSPGSLGDGLVLAGCAESPAWEYCGGPAGGITSAEERVNAKTQADDLVKQRGNDILAAAGQTWERVIAQAQVDDQVQRRGTGLVAFVSFGFDAAPPVFAVPRWVFGADAAGAWLTVAYRAEAPRPDLVEFMRCQAETWRVNSGMPLVNPMEPGDGTRAARILVERAENPGRERFEANVRAAAAAIRRGEARKIVCARRVDFPLVKPAPVAQTCARLVELLSAKYRDCWVFSVGGLTGATPEMLLEARGEASNSEAAGVAAGKRVAHARVLAGTARPGEGVNLMESAKNRREHELAVASVVAPLEALLSGSSADVVTNGCANPVVVSPGFQQPEARAFTPGENFPNGGKSGVRLDYKNKARPFFPPSGSQSVPAPHEPEVTGGEAAAAITETVQTRGPYRLELPNLVHLATDVTAPIPPGKTVFDLLGVIHPTAAVAGLPREVALGFIRRQELDRGRYAGPVGWVDARGGGQFALALRCAQVSERAISAQVGAGIMADSDPQGEFLETEAKLAPIRDCLDFDADCFE

SEQ ID NO: 94297 - protein, 459 aa, Moellerella wisconsensis
  REGION 1..459: note = tr|A0A0N0ZB38|A0A0N0ZB38_9GAMM Menaquinone-specific isochorismate synthase OS=Moellerella wisconsensis ATCC 35017 OX=1354267 GN=M992_1633 PE=4 SV=1
MSNQSAENIRGKKTATDKINNGNNSVENIITQLLCLLPTLSLAPKEITRLVYSVRPDADFSGLNWLAAQPCFPQFYWATRCGNEESAALGLGKKFNSVQEGEIFLLENPQYPDMRICGLNGWEAIGGSYSSPPEDSAFFFLPRLEWQRDLQGQRLILTLFGEEDIPATEQFLLSLQPAANIHTLNTQIIQQQHHPQHDEWCRLLTLAIAKMQTDPLEKVVMARQTALTLAAPLGVADFLYASQQVNHQCYHFMLAFDKQQGFISSTPERLYLRQGKQLLTEALAGTVASSDDDQIAAKNARWLMEDSKNQHENLVVVDDICQQLQGRVSAVDVSPAEIIRLRKVQHLRRSINAVLFSASDSDCLNRLQPTAAVSGLPRTIARQFVTEHEPFERRWYAGSGGYISSNKSEFAVSLRCAEINGHHIYLYSGAGIVSDSCPEQEWQEIDNKAAGLISLLNNS

SEQ ID NO: 94298 - protein, 1035 aa, unidentified
  source 1..1035: note = Monoraphidium neglectum
  REGION 1..1035: note = tr|A0A0D2LX13|A0A0D2LX13_9CHLO Menaquinone-specific isochorismate synthase (Fragment) OS=Monoraphidium neglectum OX=145388 GN=MNEG_13906 PE=4 SV=1
MAKQEFINGGQQGLDDLLEALGGGNGTAGDSSGSGGDNGAAGDGMRVPRAAGGGGAASGSSSGSRGGGGGAAGEEAIIKLVLARRTAWPLERRMGGVALLEALQERDPRAYQLYLSVPGGGAFVACTPERLYVRSGPHVASEAVAGTRPRGAPGDVEADFYLGLDLLKSPKDHAEFTMTRDWIRAQLSSLPGAEVDIEVSKSVLKLATVQHLYGRIAATLPPTPGVGARGADISLLAALHPTPAVCGRPQGAARAWLAEREGFDRGFYAGPFGWVTGQGAEFVVAIRSALLPEGGDGGGGGGAWRGAAGAADSVDAAQVEACAESSPDARPSTPAPDPLDLRHPTKPSQQQQQQQQQQQQQQQQHCLLAYAGVGVVYGSDPEAEWQELCLKARQFETLLAPRPALAALPNAQLAWAAALVEELCRLGVSTFCVAPGSRSSPLALAAARHPRAQLNVCIDERSLAFWALGFGRASGGPAAVVTSSGTAVANLLPAVVEASLSGVPMLILTADRPFELRDTGANQTIDQVKIFGGYVRWAQDISPPSPAVPGRAIITTADAAVRHCLGLGAPPGPVHLNMQFREPLAPAQLPWDAAAFTAGLSAWQARDAPFTRPVSARGAADGAGTAAGSPAAASHELAEALELLSRAERGLLVVGELQDPEDVAACVRLGQLLGWPVAADVLSGLRIGAVAQQQQQQQQQQQQQAAGGDVSGGGGGGFYLVSHMDHLLLGGQEWWGAVKPDVVLQVGPRLTSKRLNQFLVRGGFAGGPGPRGAAEWSALPEAHPGGTSAAWAYLGPGSDRHDAAHLVTHRMVATPAQLCGILEGHLEARRRQQQQQQQQQQQQQQQQQQQQQELEQHHAERDEREEGEGGWERPPGATMFPEASTSGSGSGPGARRRGGAPKRNGAPPVGAQEGRPRQPPQQQKQQQQQQQPYARLLLQLDAAASAQIDAALSRLDRLSEMHVARQLAAALPAGHGLFLGNSMPIRDMEMYGAPQAPPPPAMATPEAAAPPAGAARGGGAGGGAQGGGTGAGELE

SEQ ID NO: 94299 - protein, 405 aa, unidentified
  source 1..405: note = Moraxellaceae bacterium
  REGION 1..405: note = tr|A0A4Q5VLJ1|A0A4Q5VLJ1_9GAMM Isochorismate synthase OS=Moraxellaceae bacterium OX=1889775; GN = EOO69_07425 PE=4 SV=1
MMSVQHPWFKNVLHTEQHDLMKSDQPGFVFAASSGVISTRKIIKQLDLIQTEQSDYAQHMQAWVQQCITELAAHKNSNAVLVGGFPFNHDERPELLLAEASNTCLMPRQDDRRHLALFGQTIAASLLPSSEDYKHGVEAILNQIQTSTLKKAVLARAIELRPAQAVNVAQLFNNLLQDNSDGYTFALASNPAQQGWFVGASPELLVAKQNEQVFSHPVAGTLARHPDYHEDQKRAQQLLASVKDHQEHAMVIEAIADQLAPYCHQLQIPKQPSLIKTKTLWHLATPIHGLLKTADTHVLELVELLHPTPAVCGQPPQLARDLISSLEPFQRNLFTGAMGWSDAQGNGVWSVTIRCARVMNDLIRLYAGAGIVAASKPEAELAETAAKFRTMLDALGIEPEQLVYQ

SEQ ID NO: 94300 - protein, 443 aa, Morganella morganii
  REGION 1..443: note = tr|A0A422U9L4|A0A422U9L4_MORMO Isochorismate synthase MenF OS=Morganella morganii subsp. morganii; OX = 180434 GN=menF PE=3 SV=1
MTLFSDFISQVCTEITHNKNKPDGIYQYAVTLSPLLAAVLPPSALTGWLNAQTCWPQFYWQHRDGTETAAVCGEVCRFTHISDAQALLDTLPAQSQIRIWGLNSWQFDTPSPPQGTGGSYLFVPRAELRISGSETHFLVNIDSRRPAEETTEFLRSLVWQTEIPALNITVISARHQPDEAGWTQLVTDAVTAITGGEMEKVVTARKTALELSAPVSPAAFMQASCDCNHRCFHYMLATGPNTAFVASPPERLYFRAGAQLYTEALAGTVANYPEDDRAAQAAQWLLADKKNVHENSVVVDDICQRLQGAVSALDVSAAAVIRLRKVQHLYRVISATLYAPRDSDCLQRLQPTAAVAGLPRSAALAFLRDNEPFDRDWYAGSGGYCSPSRSEFAVSLRCAKISGSRVDLYAGAGIVAGSDPQAEWCEIENKAAGLRTLLESDAH

SEQ ID NO: 94301 - protein, 445 aa, Morganella psychrotolerans
  REGION 1..445: note = tr|A0A1B8HR06|A0A1B8HR06_9GAMM Isochorismate synthase MenF OS=Morganella psychrotolerans OX=368603; GN = menF PE=3 SV=1
MILFSDFISQVCAEITHNKNETNDIYQYAVILPPSLQAALPVTDWPGWLNGQVCYPQFYWQHRDGTDTAAVCGELCRFTHISEAQAVLDTLPEQSNIRIWGLNSWQFDTLSSATPEQGTGGSYLFIPRAELRCVQGNIQFLVNIDSRRPVQETVNFLRSLRGDVIPPVLETTVISAEHQPDKAGWMQLVRGAVTAISGGLMEKVVTARKTVLRLSSPVRPLAFMQASRDCNHHCYHYMLATAPDNAFMASPPERLYLRTGAQLCTEALAGTVAGDPDDARAEAAARWLLADKKNVHENSVVVDDICQRLEGAVNSLKVSDATVIRLRKVQHLYRTISATLYAPRDSDCLQRLQPTAAVAGLPRSAALEFLRKNEPFERNWYAGSGGWCSPSQSEFAVSLRCAQIHGSQIDLYAGAGIVAGSDPQAEWNEIENKAAGLRTLLEGEL

SEQ ID NO: 94302 - protein, 445 aa, Morganella sp.
  REGION 1..445: note = tr|A0A3D3HNY7|A0A3D3HNY7_9GAMM Isochorismate synthase MenF OS=Morganella sp. (in: Bacteria) OX=1912315; GN = menF PE=3 SV=1
MILFSDFISQVCAEITHNKNETNGIYQYAVTLPLSLQAALPVTDWPGWLNGQICYPQFYWQHRDGTDTAAVCGELCRFTHINEAQAVLDTLPEQSNIRIWGLNSWQFDAISPTPEQGTGGSYLFIPRAELRCVQGNIQFLVNIDSRRPAEETVTFLRSLRGNVIPPVLETTVISAEHQPDKAGWMRLVREAVTAISGGLMEKVVTARKTVLRLSAPVRPLAFMQASRDCNHHCYHYMLATAPDNAFMASPPERLYLRTGAQLCTEALAGTVAGYPDDARAEAAARWLLADKKNVHENSVVVDDICQRLSGAVNTLKVSDATVIRLRKVQHLYRTISATLYAPRDSDCLQRLQPTAAVAGLPRTAALAFLRKNEPFERNWYAGSGGWCSPSQSEFAVSLRCAQIHGSQIDLYAGAGIVAGSDPQAEWNEIENKAAGLRTLLEGEPH

SEQ ID NO: 94303 - protein, 473 aa, Moritella marina
  REGION 1..473: note = tr|A0A5J6WLG3|A0A5J6WLG3_MORMI Isochorismate synthase OS=Moritella marina ATCC 15381 OX=1202962; GN = FR932_09770 PE=4 SV=1
MLNLTAAITSLQQQVIQAQPEQTRISVNLQPLNSTELIEWLGAQVLFPQFYWQSRDGDEEVVALGQCCHCHDVSLAKTLFTQPQRMWGGQSFSRQQSRQKSSSKDTIHRNYYFLPQIELTRQQDHWQLSVNLPVAKQAMLDLGYDKAQLLASLASLIAPAPTPLPQSYKIESRHHYPEFKQWSHLVTKALTAIDDQYFAKVVLARKTVLTLNRPLSATQFLQQSRQVNQQCFHFIFAIYADDYFVGSTPERLFSRDFDNLHTEALAGTAARSLDDTEDRALANWLLNDEKNRYENRLVIDDLLSRLQSRCRTLQVERRPELIQLRKVQHLKHKIDGQLVAGIDDAELLTSLQPTAAIAGLPRRPALDFIADNEPFDRGWYSGALGYIGQQQSEFCVAIRSARVLGHELQLFAGAGIVPGSDPQSEWQELERKTATLLTLLEPDSHGYRDDRMYPNKNNKHVLANQFTPEQQRA

SEQ ID NO: 94304 - protein, 492 aa, Moritella sp.
  REGION 1..492: note = tr|A0A2I0FB33|A0A2I0FB33_9GAMM Isochorismate synthase MenF OS=Moritella sp. Urea-trap-13 OX=2058327; GN = menF PE=3 SV=1
MLKLTAAITALQQQVIHAQPEQTRISVDLQPLNSTELIEWLGAQVLFPQFYWQSRDGGEEVVALGQCCHCHDVSLAKTLFTEPQRMWGGQAFSSQESNKESSQSLNNSDRTTRNYYFLPQIELTRQQTHWQLSVNLPANRPAISVAKQSMADAGYDKTQLLASLAELIAPAPIPLPQSYKIESRRHYPEFKQWSHLVTKALTAIDEQYFAKVVLARKTVLTLNRSLSATQFLQQSRQVNQHCFHFIFAIHADDYFVGSTPERLFSRDADNLHTEALAGTAARSLDAAEDRALANWLLNDKKNRYENRLVADDLLSRLQPRCRSLQVEKRPELIKLRKVQHLKHKIAGQLMAGVDDAELLTSLQPTAAIAGLPRQPALDFIADNEPFDRGWYSGALGYIGQQQSEFCVAIRSARVLGRELQLFAGAGIVPGSDPESEWQELERKTATLLTLLEPDANDYRADYGSSTTNNRNTTNSTNKHVLANQFASEQQRA

SEQ ID NO: 94305 - protein, 463 aa, Moritella viscosa
  REGION 1..463: note = tr|A0A090IE87|A0A090IE87_9GAMM Isochorismate synthase MenF OS=Moritella viscosa OX=80854 GN=menF PE=3; SV = 1
MLILATAIKALQQLIIHAQPEQTRLSVELQPLHATDLIEWFDAQILFPQFYWQSRDCDEEVVALGQCCHFHDLDTAKNQLNEQQRIWGGCAFSHQDYYFLPQIELTRKNSRWQLSVNLPAHSVNVHDGDGDGIKSTQQAYDKAALLESLAHLITPAPTPLPLSYKIEARSHYPEFNQWSHLVTKALNAIEQQDFDKVVLARKTKLTLNRPLSAAQFLQQSRLVNQQCYHFIFALQANDYFVGSTPELLFSRKQRQLDTEALAGTAARSDDAAEDRGLAHWLLHDSKNRYENSLVVGDLMARLDPRCDSLQVSVQPELVKLRKVQHLKHHISGTLTTDVDDAELLANLQPTAAVAGLPRQPALNFIVNNEPFLRGWYSGALGYVGLQQSEFCVAIRSARILGHEVQLFSGAGIVPGSNPVSEWQELERKTATLLTLLEPDSTVNCNMDCDDIRLNAFVPELQRA

SEQ ID NO: 94306 - protein, 466 aa, Moritella yayanosii
  REGION 1..466: note = tr|A0A330LPV5|A0A330LPV5_9GAMM Isochorismate synthase MenF OS=Moritella yayanosii OX=69539 GN=menF PE=3; SV = 1
MILTTAIKALQQLIIHAQPEQTRLSVELQPLHSTELIEWFDAQVLFPQFYWQSRDGDEEVVALGQCCHFNNINAAKGKFSGPQRIWGGCDFSHQEYYFLPQIELTRNTNSWQLSVNLPADPVLLHKDAGRDSTAQAYDKTVLLESLANLITPAPTPIPLSYKIEARSHYPEFNQWSHLVTKALTAIKQQRFAKVVLARQSILTLNRPLSAAQFLQKSRQVNQHCFHFIFALKPNDYFVGSTPERLFTRTRTQLHTEALAGTAARSDDAREDRALANWLLHDPKNRYENRLVVDDLMSRLGTRCTSLQVSMRPELVKLRKVQHLKHHISGELVAGVDDAELLASLQPTAAIAGLPRQPALDFIAENEPFSRGWYSGALGYVSQHKSEFCVAIRSARIVENELQLFAGAGIVPGSDPMSEWQELERKTATLLTLLEPDSNEHSDTNDHHDHKQKHVLANLFTSEQQRA

SEQ ID NO: 94307 - protein, 428 aa, unidentified
  source 1..428: note = Motilimonas sp.
  REGION 1..428: note = tr|A0A418YHA4|A0A418YHA4_9GAMM Isochorismate synthase MenF OS=Motilimonas sp. PLHSC7-2 OX=2303987; GN = menF PE=3 SV=1
MEILDDLKAILRQLPASDETLMSWHFPIKENNLLAWLHAQTEFPQLYFSDKDDQAETAILGCAWQTNSAEIPPELKDVTLYGGQGFDLRSQWPEFGHCRFILPRLKLTRQGKHVVLTCYLCTLSQDLATEISDCLTLLEKLQQKTPLHWQPPGIASRTDSPSFEQWQQQVNTVCSPAFQQHTAKVVLSRSTELVCHHQVDPFLLLARWQTLNANCFQFLFRWHDGPAFIGCTPERLYLRSGARLTTEALAGTMARGQSSQEDETISQDLLHDPKIHRENQLVLDDILHHLKSVSLDVGIDKIGVLKLNHILHLKQRIHAYLKPEVEDQHLLNALHPTPAVGGTPRQAALDFIAEQEPYSRGWYAGAIGMLSRKQSHFAVAIRSALVAGNTVQLFAGAGIVKGSQPAEEWQELNNKIATVYSLLEPTWR

SEQ ID NO: 94308 - protein, 439 aa, unidentified
  source 1..439: note = Mumia sp.
  REGION 1..439: note = tr|A0A5C4LZZ5|A0A5C4LZZ5_9ACTN Isochorismate synthase OS=Mumia sp. 527 OX=2585212 GN=FHE65_15145 PE=4; SV = 1
MTDTVAPLRGPLRLVAQSVPLDEATLDGVPLTHLLPADGGLAWVRDGDGLVAWGEAARLETTGAQRFADAGAWWREVSAHAVVRDKVGVAGSGLVAFGSFAFGDTSGISRGRRAGSSVLVVPSVVVGRRAGTTWVTTIRESALAPTPQISPTDEPVSPEGVAFADGSTSGAQWESIVSEAVRRIAAGDLDKVVLARDLVAELAAPLDARAPVRRLAEAYPNCWTFHVDRLFGATPEMLVRRERGLVTSRVLAGTIRRTGDDTRDLALAGSLARSSKDLEEHEYAVRSVADALEPYCSSMNVPEAPFVLHLPNVMHLATDVAGVVDAGHETASALELAAALHPSAAVGGTPRAEALALIDEIEKLDRGRYAAPVGWIDADGDGEWGIALRSAEYDGARVRLFAGCGIVADSDPEAELAESQAKLVPVRDALAASEDDLPV

SEQ ID NO: 94309 - protein, 424 aa, unidentified
  source 1..424: note = Muribacter muris
  REGION 1..424: note = tr|A0A0J5P2Z2|A0A0J5P2Z2_9PAST Isochorismate synthase MenF OS=Muribacter muris OX=67855 GN=menF PE=3; SV = 1
MSIFHQLKQQLSQQIQHLADTAEWSELTAEIALPDETPNVLAWLKGQTHFPQYFWQSRDEDNTLVALGAARRFECLDDAQAFSERYGYRLVGGLTFEKACRFILPRLLFVKNVRKLTAYCYLNGQERQQVSQFLHQIAPMTTLTKTAGSEPLARQQAATFSDWAANIERAIHTIQTSELNKVVLANATTLTFTKPVCPYDLLFASQQKNLGCYHFLWSENGEQTFIGSSPERLYRRQGRYFYTEALAGTAAVTADVEQTECNALWLLNDPKNRYENWLVVDDICSHLTDCAADIQVGEAEIKRLKNVQHLRRFIQTQLADKVKDGDCLARIHPTAAVAGLPRPLATEFIRRHEQFQRGWYAGTLGYFTPENAEFCVALRSALIEKNHITLYAGAGIVEGSKPDDEWQEIERKSLAIANLLTVER

SEQ ID NO: 94310 - protein, 345 aa, Muricauda lutimaris
  REGION 1..345: note = tr|A0A3A1N7F1|A0A3A1N7F1_9FLAO Isochorismate synthase OS=Muricauda lutimaris OX=475082 GN=D2V08_16130; PE = 4 SV=1
MQEILDRAKDCYDSGLPFVVYRKPNETDVFGVFQSNDELRSSKDFTEKGFVFAPFNDDNQVVLLQPDEVWEGKYQTEKSEAIKDINLDESGKEVHIELVKKGIQEIETGRLQKVVLSRKIQVRITKPPFKIFKTLLSKYPNAFAYFIHHPKVGTWCGATPETLVKVKDKKLKTMSLAATLPFIEDETPKWGNKEIEEQQMVSEYIGDKLAHTMERLEIDEAESVRAGNLWHLRSEVRGTMLPNLKVSEVVRALHPTPAVCGIPTDEAQKFIHKNENYKRTFYTGFLGELNLRSQGELSLFVNLRCMELQGDTASIFVGGGITEASDPESEWIETQNKSKTMLGIL

SEQ ID NO: 94311 - protein, 342 aa, Muricauda sp.
  REGION 1..342: note = tr|A0A4S8RL85|A0A4S8RL85_9FLAO Isochorismate synthase OS=Muricauda sp. SCR12 OX=2530200 GN=EZV76_14615; PE = 4 SV=1
MIGRVGDCLKEGLPFCIYRKPNQSQITAVFQLEDALHSVVDFSEKGFVFAPFQFENGAVLLKPDEIFVTQMENSEHSPFGEIQLSEIGRNDHLELIKKGIEEINTGRLSKVVLSRKLEAETKLSPPEIFTQLLQHYPNAFCYLFHHPKIGTWCGATPETLMTIQNREIKTMSLAATLPFVEGEVPQWKEKELEEQQMVSDYIRERLTGLMESLDIEEAKSVRAGNLWHLKSRINGKMLPKTSVNKIVSLLHPTPAVCGIPTQKAKEFILKHENYRRTYYTGFLGELNLNQATETSLYVNLRCMELKGQTASIYVGGGITKASDPEREWVETQNKSKTILHIL

SEQ ID NO: 94312 - protein, 352 aa, unidentified
  source 1..352: note = Muricauda taeanensis
  REGION 1..352: note = tr|A0A3A1NU65|A0A3A1NU65_9FLAO Isochorismate synthase OS=Muricauda taeanensis OX=1005926 GN=D2V93_09405; PE = 4 SV=1
MHYPENKELQHLFDNVENQLKKNLPFAIYRKPQQEELVGVFQADNELWSTDFKDKGFVFAPFDLSKGAVLIRPDETVKATHSFLKKLDRAEVALSEEGKKGHMTLVEKGIQEIGKGNLKKVVLSRRMEVSLTKSPLAIFDDLLQQYPNAFCYLFHHPEVGTWCGATPETLVKIKGGELWTMSLAATLPYEGNENPQWGSKEIEEQNMVSDYIREKLHHSMERLEIDEAKSIRAGNLWHLRSEVRGKMRPETDIQKVITTLHPTPAVCGIPTQDAMDFIMGNENYERTFYTGFLGELNLFAQNDISLFVNLRCMELNGDKATIFVGGGITSASNPLDEWIETQNKSKTMLGIL

SEQ ID NO: 94313 - protein, 355 aa, Muriicola sp.
  REGION 1..355: note = tr|A0A411E9D3|A0A411E9D3_9FLAO Isochorismate synthase OS=Muriicola sp. MMS17-SY002 OX=2507538; GN = EQY75_07120 PE=4 SV=1
MPSPKNKIQDELLAQLEAHHQNHLPFVIFKYPGASELKAILQSDASLNFTSNFTEPGFVFSPFDDGQRTILLRPDDVLIAKLHNTELPKESSLRQHIEDQKEASRYKKLVADAITAIQQHDLRKVVLSRPIEVATANSAINIFNQLSREYPTAFCYCWYHPKVGCWVGATPEILLKVQGAQFTTVALAGTIEKSGTEKPNWQAKEREEQQLVTQYILEVAADLGIEVNSSEAQTTDAGALWHLKTTLSGKVQPEQIASMIRSLHPTPAVCGIPLKESMYYIEQHEGYPRKFYTGYLGEIKEGSQREIQLFVNLRCMEYREGKAIVYVGGGITRDSDPEKEWQETIAKSRTILKVL

SEQ ID NO: 94314 - protein, 415 aa, Mycetocola lacteus
  REGION 1..415: note = tr|A0A3L7AGU2|A0A3L7AGU2_9MICO Isochorismate synthase OS=Mycetocola lacteus OX=76637 GN=D9V34_15710; PE = 4 SV=1
MSTPVIPRLHVTTRALADPGTLFGFADRTNPLMWMRDGAGIVGSGVALRLSTAGEDRITDLATQWQQIADTARVRDEVGLPGTGLVAFGTIAFSAVSSAESVLIVPRVIVGRSGEHAWITRVSLEGEPTVDADLLPARTPLGQSLTADLAEDPADAERHRDLVRTALARIQRGDVAKIVLARTVTGQLQADGDRRRLAADLAAAYPQCWTYAVDGMIGASPETLISVRDGSLSLRVLAGTAARGHGATEDRAAAETLIESRKDRDEHAFAVRSALAALAPHAAGLHGQDSPFTLRLPNLWHLATDISGRISDRASVLDLIQALHPTAAVGGTPTLAAIDLINELEPFDRGRYAGPTGWVDAHGNGDWAIALRGAQVDPDGHITAYAGGGIVAGSDPESEFRETGMKFRPIRDALS

SEQ ID NO: 94315 - protein, 418 aa, unidentified
  source 1..418: note = Mycetocola manganoxydans
  REGION 1..418: note = tr|A0A3L6ZLS3|A0A3L6ZLS3_9MICO Isochorismate synthase OS=Mycetocola manganoxydans OX=699879; GN = D9V29_12785 PE=4 SV=1
MTSPGTLPTATERLVVETQQVDDTRSLLTLVDPQRPLLWLRKGCGLAGIGEALRLEFSGPDRMREAAVVWRDIAAAATVEDPLRMPGTGLVAFGTFAFDDSSAQTSVLLVPQIILGRRDGTSWITRIRLDATASDAPDPLATAFGPTYRLTLTPGAESPAGFQAHVADAVDRILAGDLSKVVLSRDLIGHLPADADLRRIVSDLAVGYPDCWTFAVDGLLGSSPETLVSVQDGSVTARVLAGTASRGADAASDQDAAVNLATSAKDQDEHQFAVQSVLASLRPHTSHVLTSEIPFTLKLPNLWHLATDVEGTLTDNATSLDLIDALHPTAAVAGSPTPAAVALIAELEPFDRGRYAGPVGWVGADGDGEWAIALRCAQVDQDGTVTAYAGGGIVAESVPEKELAETRMKFRPIVDAFG

SEQ ID NO: 94316 - protein, 413 aa, Mycetocola reblochoni
  REGION 1..413: note = tr|A0A1R4IXS2|A0A1R4IXS2_9MICO Menaquinone-specific isochorismate synthase OS=Mycetocola reblochoni REB411; OX = 1255698 GN=FM119_04270 PE=4 SV=1
MSTSAPATLTVETLEHDGTRRLIPLLDARRPLLWQRRDRGLAGVGEVLRLEYSGPTRFADAARDWAAITAAADVTDEVGLPGTGLVAFGTFAFDDSSAERSVLIVPRLIVGTAEGRTWVTRIRLGDAADGSPELQPRAIGPEYRIGFLPGTPGPDGYRAAVAEGVRRIAEGGLDKVVLARQVHGRLPAGADLRRALGDLALSYPECWTFAVDGMLGASPETLVRVVDGRVSTRVLAGSAARGADADADRAAADGLRTSPKNTSEHDFAVRSALAALAPHGEELTTGEGVFALKLPNLWHLATDITGRIGDGSGSLDLLGALHPTAAVAGTPRADALATIHELEGFDRGRFAGPVGWVGAGGEGEWAIALRCAQLGADGAITASAGAGIVAASDPDAELAETRMKLRPIIEAFG

SEQ ID NO: 94317 - protein, 413 aa, Mycetocola tolaasinivorans
  REGION 1..413: note = tr|A0A3L7A633|A0A3L7A633_9MICO Isochorismate synthase OS=Mycetocola tolaasinivorans OX=76635; GN = D9V32_09470 PE=4 SV=1
MSSRVIPRLHVTTRALADPGTLFGFASRTDPLIWMRGGAGIVGSGEALRLVHTGEDRITDLAADWQSVAASARVDDDVRLPGTGLIAFGTIAFSAASATESVLIVPRQIVGRSGEHAWITEISIDGEAYPEGAPVRTPLGESVTVPLAEDADADQRHQALVRTALERIARGDVAKVVLARTLTGRLPEGADRRRLAADLAAAYPQCWTYAVDGMIGASPETLISVRAGSLSLRVLAGTAARGHGAEADQAAADTLLESRKDRDEHAYAVRSALAALGPHAAGLHGQDSPFTLRLPNLWHLATDISGRISDRASVLDLIQALHPTAAVGGTPTAAAIDLIDELEPFDRGRYAGPTGWVDAHGNGDWAIALRGAQVDPAGDITAYAGGGIVAGSDPASEFRETGIKFRPIRDALS

SEQ ID NO: 94318 - protein, 410 aa, unidentified
  source 1..410: note = Mycetocola zhadangensis
  REGION 1..410: note = tr|A0A3L7IW07|A0A3L7IW07_9MICO Isochorismate synthase OS=Mycetocola zhadangensis OX=1164595; GN = D9V28_15020 PE=4 SV=1
MRHLTVSTIQVDDIRSLLPLANPHHPLLWLRQGDGITGLGETLRLEFSGPTRMADAARLWREVAAAADISDEVRMPGSGLVAFGTFAFADSSAKSSVLVIPRMILGRRDGVSWITRITESDSGTEPMASAPSATPFGDEYRISLTPGAESVDGFQAHVAEAVERIVAGNVDKVVLSRDLTGHLPAGADLRRVLADLALGYPNCWTYSVDGLIGSSPETLVTVSNGSVTARVLAGTSSRGRDAESDHRAAVDLQSSTKDQDEHQFAVQSVLDSLRPHTAHVITSEMPFTLKLPNLWHLATDVEGTLTDDASSLDLIDALHPTAAVAGAPTAKAVALIDELEPFDRGRYAGPVGWVGADGDGEWAIALRSAQVEHNGDVTAYAGCGIVAESVPEKELAETRMKFRPILDAFA

SEQ ID NO: 94319 - protein, 371 aa, unidentified
  source 1..371: note = Mycobacterium attenuatum
  REGION 1..371: note = tr|A0A498PU57|A0A498PU57_9MYCO Isochorismate synthase MenF OS=Mycobacterium attenuatum OX=2341086; GN = menF PE=4 SV=1
MASGRLSPVEPPFALCGPGRTLVADGVRAHYCDVRAAQAALRSGSAPMIVGALPFDVNKPAALMVPNQVRRLEALPGWPTGPLPKVHVSAAVPSLVDHRARISNARDQLGALDNPLHKVVLARALRFSADAALDARILLRRLAAADPASYGYLVDLSPAGDTYLGAALVGASPELLVTRAGDRVICQPFAGSAPRAADPEVDAANGAALAGSAKNRHEHQLVIDTMYAVLQPLCDDLEIASEPHLNRTAAVWHLCTPIAGRLRDTSTTAIDLALALHPTPAVGGVPTEAAKELIAALEGDRGFYAGTVGWCDARGDGSWVVSIRCAQLSADRRTAIAHAGGGIVAESDPDDEVAETTTKFTTILTALGVQQ

SEQ ID NO: 94320 - protein, 364 aa, Mycobacterium avium
  REGION 1..364: note = tr|A0A0H3A219|A0A0H3A219_MYCA1 Isochorismate synthase DhbC OS=Mycobacterium avium (strain 104); OX = 243243 GN=MAV_4163 PE=4 SV=1
MNDEPTFALCGPTQTLVADGVRRSYRDVAAAQAALRSQEVSIVLGALPFDVRRPAALLTPDTVSVSDGPPDWPARKLPSMRVAAALPPPIDYRDRICRAREQLAATDNPLHKVVLARALHLVADAPLDARTILRRLIAADPGAYGYLVDLSAAGHDHAGVALVGASPELLVARTGDRVECRPFAGSAPRAADPDTDAANGAALASSAKNRHEHQLVIETIRAALEPLCDDLSIAAQPQLSRTATVWHLCTPISGRLRDKSTTAIDLALALHPTPAVGGVPTDAAVELIAELEGDRGFYAGAVGWCDARGDGRWVVSIRCAQLSADRRSALARAGGGIVAESDPDDEVAETTTKFATILNALDVR

SEQ ID NO: 94321 - protein, 324 aa, unidentified
  source 1..324: note = Mycobacterium basiliense
  REGION 1..324: note = tr|A0A3S4DRW6|A0A3S4DRW6_9MYCO Isochorismate synthase DhbC OS=Mycobacterium basiliense OX=2094119; GN = dhbC PE=4 SV=1
MLLGALPFDVHRPAALMVPTTVQRMDSLPNWRTDPLPRVRISAAVPPPAQHRARISQAREQLAAADNSLSKVVLARALQLTADAPLDARVIVRRLVAADPTSYGYLVDLSAAGDDYVGATLVGASPELLVARLGDRVTCQPFAGSAPRAANADVDAANAAALAGSAKNRHEHQLVIDALRAALEPLCDDLEIAAEPRLTSTAAVWHLCTPVTARLRDTSTTALDLAVALHPTPAVGGVPTTAATELIAALEGDRGFYAGTVGWCDARGDGDWVVSIRGAHLSADRRTALAHAGGGIVAESNPDDEVDETTTKFATILNALGVEQ

SEQ ID NO: 94322 - protein, 450 aa, Mycobacterium bovis
  REGION 1..450: note = sp|Q7TYQ1|MBTI_MYCBO Salicylate synthase; OS = Mycobacterium bovis (strain ATCC BAA-935 / AF2122/97); OX = 233413 GN=mbtI PE=3 SV=1
MSELSVATGAVSTASSSIPMPAGVNPADLAAELAAVVTESVDEDYLLYECDGQWVLAAGVQAMVELDSDELRVIRDGVTRRQQWSGRPGAALGEAVDRLLLETDQAFGWVAFEFGVHRYGLQQRLAPHTPLARVFSPRTRIMVSEKEIRLFDAGIRHREAIDRLLATGVREVPQSRSVDVSDDPSGFRRRVAVAVDEIAAGRYHKVILSRCVEVPFAIDFPLTYRLGRRHNTPVRSFLLQLGGIRALGYSPELVTAVRADGVVITEPLAGTRALGRGPAIDRLARDDLESNSKEIVEHAISVRSSLEEITDIAEPGSAAVIDFMTVRERGSVQHLGSTIRARLDPSSDRMAALEALFPAVTASGIPKAAGVEAIFRLDECPRGLYSGAVVMLSADGGLDAALTLRAAYQVGGRTWLRAGAGIIEESEPEREFEETCEKLSTLTPYLVARQ

SEQ ID NO: 94323 - protein, 450 aa, Mycobacterium chimaera
  REGION 1..450: note = tr|A0A220YA66|A0A220YA66_9MYCO Salicylate synthase; OS = Mycobacterium chimaera OX=222805 GN=BWK49_10300 PE=4; SV = 1
MTEVSVETSSAGSASPSIPLPAHIDPADLAAELAVVLSERVGEEYLLYERSGEWVLATGVHAMIELDSDELRVIRDGVTQRQQWSGRPGPALGEAIDRLLLETDQLFGWIAFEFGVYRYGLQQRLAPETPLARVFWPRGRIVVSREAIRLFDASADHRDVVLAVLGDGVSGLREASAIDVIADTSDYRNRVASAVAEIAAGRYHKVILSRSLEVPFALDFPSTYRLARRHNTPVRSFLLSLGGIRAVGYSPELVAAVRRDGVVVTEPLAGTRALGRGEARDREARDDLESNSKEIVEHAISVRSSLQEMTEIAEPGTAVVTDFMTVRERGSVQHLGSTVSGRLGTSNDRMDALEALFPAVTASGIPKAGGVEAIMRLDEGPRGLYSGAVVMISADGGLDAALTLRAAYERDGRTWLRAGAGIIEESTPEREFEETCEKLSTLAPYLIARP

SEQ ID NO: 94324 - protein, 365 aa, Mycobacterium chubuense
  REGION 1..365: note = tr|I4BFZ6|I4BFZ6_MYCCN Isochorismate synthase family protein OS=Mycobacterium chubuense (strain NBB4) OX=710421; GN = Mycch_1401 PE=4 SV=1
MTREPSFVMAGPEGVVVAEGVQTAFPHIADARAALASHSTPMVVGALPFDVAAPAALLRPQSVRFTDALPAWPLRELAATRIAEMTPDADEHRRRIAAALERLRDPAGGLQKVVLARALRLAADGPLDARTVLHRLAADDVQATKYLVDLSAAGDGYSGAALIGASPELLVARQGLQVTCRPFAGSAPRHRDPDADAASGAALADSAKNRHEHQLVVEALRDALDPLCTDLQVAEHPQLTKTAAVWHLYTPISGRLREKSTTALDLAVALHPTPAVGGSPTDRAVALIDEIEGDRGFYAGTVGWCDQRGDGRWVVSIRCAQLSADRRTAVAHSGGGIVAESDPDDEVDETTTKFKTILSALGVAP

SEQ ID NO: 94325 - protein, 365 aa, unidentified
  source 1..365: note = Mycobacterium eburneum
  REGION 1..365: note = tr|A0A4R5PZC6|A0A4R5PZC6_9MYCO Isochorismate synthase OS=Mycobacterium eburneum OX=2035343; GN = E2F47_12850 PE=4 SV=1
MTSEPPFVLCGPTGALIADGVRNGYPEVAAAQAALASGEAPIVVGALPFDVHSAAALLTPHAVRRADTLPDWPTAPLPAVRVDATVPAPEVHRQRIRHALAQLCAPQATLSKVVLARALRLVADAPLDARSVVSRLVAADRSGYGYLVDLTPAGEPYCGAALVGASPELLVAREGATVTCRPFAGSAPRAADPEIDRANGAALVASGKNRHEHQLVIDTMRDALQPLCTDLRIAATPQLSHTAALWHLSTPITGRLRDTATTALDLALALHPTPAVGGVPTDAAVQLIGALEGDRGFYAGAVGWCDRHGDGRWVVAIRCAQLSADRRTALAHSGGGIVAGSDPDDEVDETTTKFATILNALGVDQ

SEQ ID NO: 94326 - protein, 362 aa, unidentified
  source 1..362: note = Mycobacterium grossiae
  REGION 1..362: note = tr|A0A5C1KQI5|A0A5C1KQI5_9MYCO Isochorismate synthase OS=Mycobacterium grossiae OX=1552759; GN = FZ046_13485 PE=4 SV=1
MMGEPSFVLGGPAGTLIAEGIAAGYPALADARAALAAGEAPMVVGALPFDLTRPAALFRPEHLRFADGPPAASGRPLPRVRVDGAFPAPEVHRARIAEALRRLNDPRTGLHKVVLARALRLVADAPLDAVDVLHLLARDHSASAYFADLTPAGRPGAALIGASPELLVARTGDVVTCRPFAGSAPRSTDPDTDAAHGRALAASAKNRHEHQLVVDQMRTALAPLCRDVTIAARPELSSTSAVWHLSTPITGRLRDTSVTALDLAIALHPTPAVGGVPAGPATDLINELEGDRGFYAGAVGWCDARGDGRWVVAIRCAELSADRRVAEARAGGGIVAESDPDDEVAETGIKFATIMTALGVPQ

SEQ ID NO: 94327 - protein, 377 aa, unidentified
  source 1..377: note = Mycobacterium innocens
  REGION 1..377: note = tr|A0A498PW35|A0A498PW35_9MYCO Isochorismate synthase MenF OS=Mycobacterium innocens OX=2341083 GN=menF; PE = 4 SV=1
MCARSEGVSRQLSPLEPPFALCGPGRTLVADGVRTRYRDIRAAQAALRSGSAPMILGALPFDVSEPAALMEPTSVQRLEALPGWPTGALSAVHISSAVPPLAEHRARISYARDQLAALDNPLRKVVLARALRLTADAPLDARVILRRLVAADPASYGYLVDLSAAGDDYLGSALVGASPELLVARSGDRVSCQPFAGSAPRAADPEIDAANAAALAGSAKNRHEHQLVIDTMYAALEPVCDDLEIASEPQLTRTAAVWHLCTPITGHLRDTTTTAIDLALALHPTPAVGGVPTSAAGELIAALEGDRGFYAGTVGWCDARGDGRWVVSIRCAQLSADRRTAIAHAGGGIVAESDPDDEVEETTTKFATMLTALGVQQ

SEQ ID NO: 94328 - protein, 450 aa, Mycobacterium intracellulare
  REGION 1..450: note = tr|X8CRC7|X8CRC7_MYCIT Salicylate synthase; OS = Mycobacterium intracellulare 1956 OX=1299331; GN = I550_1554 PE=4 SV=1
MTEVSVETSSAGSASPSIPLPAHIDPADLAAELAVVLSERVGEEYLLYERSGEWVLATGVHAMIELDSDELRVIRDGVTQRQQWSGRPGPALGEAIDRLLLETDQLFGWIAFEFGVYRYGLQQRLAPETPLARVFWPRGRIVVSREAIRLFDASADHRDVVLAVLGDGVSGLREASAIDVIADTSDYRNRVASAVAEIAAGRYHKVILSRSLEVPFALDFPSTYRLARRHNTPVRSFLLSLGGIRAVGYSPELVAAVRRDGVVVTEPLAGTRALGRGEARDREARDDLESNSKEIVEHAISVRSSLQEMTEIAEPGTAVVTDFMTVRERGSVQHLGSTVSGRLGTSNDRMDALEALFPAVTASGIPKAGGVEAIMRLDEGPRGLYSGAVVMISADGGLDAALTLRAAYERDGRTWLRAGAGIIEESTPEREFEETCEKLSTLAPYLIARA

SEQ ID NO: 94329 - protein, 366 aa, Mycobacterium kansasii
  REGION 1..366: note = tr|X7ZQP3|X7ZQP3_MYCKA Isochorismate synthase family protein OS=Mycobacterium kansasii 662 OX=1299326; GN = I545_0475 PE=4 SV=1
MSPIEPPFALCGPGRTLVAHGVRARYRDIRAAQAALRSGSVPMIVGALPFDVSEPAALMVPTSVQRLEALPGWPTGPLSPVHISAAIPPLAEHRARISYARDQLAVLDNPLRKVVLARALRLTADAPLDARVILRRLVAADPASYGYLVDLSAAGDDYLGAALVGASPELLVARSGDRVTCQPFAGSAPRAADPEIDAANAAALAGSAKNRYEHQLVIDTMYAALEPLCDHLEIASEPQLTRTAAVWHLCTPITGHLRDTATTAIDLALALHPTPAVGGVPTSAAGELIAALEGDRGFYAGTVGWCDARGDGRWVVSIRCAQLSADRRSAIAHAGGGIVAESDPDDEVAETTTKFTTMLTALGVQQ

SEQ ID NO: 94330 - protein, 324 aa, unidentified
  source 1..324: note = Mycobacterium liflandii
  REGION 1..324: note = tr|L7V4R3|L7V4R3_MYCL1 Isochorismate synthase EntC; OS = Mycobacterium liflandii (strain 128FXT) OX=459424; GN = entC PE=4 SV=1
MLLGALPFDVSQPAALMVPTSVRRETGLPDWPTEAPPRVRISAAVPPLAEHRARITRARDQLAAPQGLLHKVVLARALQLTAETALDPRVVLRRLMAADPTSYGYLVDLTAAGDCYTGAALVGASPELLVARFGDQVTCQPFAGSAPRSADPEIDAANATALAGSAKNRHEHQLVIDTMREALEPLCDELKIAPEPELTGTAAVWHLCTPVIGKLRDTATTAIDLALALHPTPAVGGVPTNAASELIASLEGDRGFYAGTVGWCDAGGDGYWVVSIRCAQLSADRRTALAHAGGGIVAESNPDDEVDETTTKFATILTALGVKQ

SEQ ID NO: 94331 - protein, 324 aa, Mycobacterium marinum
  REGION 1..324: note = tr|A0A3E2MY00|A0A3E2MY00_MYCMR Isochorismate synthase DhbC OS=Mycobacterium marinum OX=1781 GN=dhbC; PE = 4 SV=1
MLLGAFPFDVSRPAALMVPTSVRRETGLPDWPTEAPPRVRISAAVPPLAEHRARITRARDQLAAPQGLLHKVVLARALQLTAETALDARVVLRRLMAADPTSYSYLVDLTAAGDCYTGAALVGASPELLVARFGDQVTCQPFAGSAPRSADPEIDAANATALAGSAKNRHEHQLVIDTMREALEPLCDELKIAPEPELTGTAAVWHLCTPVIGKLRDTATTAIDLALALHPTPAVGGVPTNAASELIAALEGDRGFYAGTVGWCDAGGDGYWVVSIRCAQLSADRRTALAHAGGGIVAESNPDDEVDETTTKFATILTALGVKQ

SEQ ID NO: 94332 - protein, 372 aa, unidentified
  source 1..372: note = Mycobacterium orygis
  REGION 1..372: note = tr|A0A501P465|A0A501P465_9MYCO Isochorismate synthase OS=Mycobacterium orygis OX=1305738 GN=FHI80_05555; PE = 4 SV=1
MSAHVATLHPEPPFALCGPRGTLIARGVRTRYCDVRAAQAALRSGTAPILLGALPFDVSRPAALMVPDGVLRARKLPDWPTGPLPKVRVAAALPPPADYLTRIGRARDLLAAFDGPLHKVVLARAVQLTADAPLDARVLLRRLVVADPTAYGYLVDLTSAGNDDTGAALVGASPELLVARSGNRVMCKPFAGSAPRAADPKLDAANAAALASSAKNRHEHQLVVDTMRVALEPLCEDLTIPAQPQLNRTAAVWHLCTAITGRLRNISTTAIDLALALHPTPAVGGVPTKAATELIAELEGDRGFYAGAVGWCDGRGDGHWVVSIRCAQLSADRRAALAHAGGGIVAESDPDDELEETTTKFATILTALGVEQ

SEQ ID NO: 94333 - protein, 365 aa, unidentified
  source 1..365: note = Mycobacterium paragordonae
  REGION 1..365: note = tr|A0A4R5WN69|A0A4R5WN69_9MYCO Isochorismate synthase OS=Mycobacterium paragordonae OX=1389713; GN = EUA02_19935 PE=4 SV=1
MSAEPAFVLTGPRGTLLVDRARDHFPDIASAQAALQTGRAQIVLGALPFDVNGPAALMAPDTLRRLDTLPDWPRDPLPSVRVDAALPPGGEHADRIRRAREQLAAPGNSLRKVVLARALRLAADAPLDGRVVLRRLIDADPTAYGFCADLSAAGAAYTGAALVGASPELLVAKSGDQVVCRPFAGSAPRSADPDIDAANGAALAASEKNRHEHQLVIDTMRAALEPLCDDLTIAAEPQLSRTAAVWHLCTPIVGHLRDTSTSAIDLALALHPTPAVGGVPTEQATELIAELEGDRGFYAGAVGWCDEHGDGYWVVSIRCAELSADRRTALARAGGGIVAESDPDDEVAETTTKFATILKALGVQQ

SEQ ID NO: 94334 - protein, 366 aa, Mycobacterium parascrofulaceum
  REGION 1..366: note = tr|D5PD71|D5PD71_9MYCO Isochorismate synthase; OS = Mycobacterium parascrofulaceum ATCC BAA-614 OX=525368; GN = entC PE=4 SV=1
MNDHEPPFALCGPTQTLVADGVRERYRDAAAAQRALRSGASSIVLGALPFDVEWPAALLTPGAVRHTDGPPDWPTGPLPPVRIAAADPPPGQYRDRIRRARDQLAAPDSLLSKVVLSRALRLVADAPLDARVILRRLVAADPAAYGYLVDLTGAGDDYAGVALVGASPELLVARSGDRVTCRPFAGSAPRAADPDVDAANGAALAGSAKDRHEHQLVIETIRAALEPLCDELTIADEPELSRTAAVWHLCTPIGGRLRDTSTTAIDLALALHPTPAVGGVPTKAAVELIAELEGDRGFYAGAVGWCDARGDGRWVVSIRCAQLSADRRTALARSGGGIVAESDPDAEVAETTTKFATILDALDVER

SEQ ID NO: 94335 - protein, 366 aa, unidentified
  source 1..366: note = Mycobacterium persicum
  REGION 1..366: note = tr|A0A1X0LCN3|A0A1X0LCN3_9MYCO Isochorismate synthase MenF OS=Mycobacterium persicum OX=1487726 GN=menF; PE = 4 SV=1
MSPIEPPFALCGPRRTLVADGVRSHYRDIRAAQAALRSGSVPMILGALPFDVSEPAALMEPTSVQRLDALPGWPTGPLSAVHVSAAVPPLAEHRARISYARDQLAALDNPLRKVVLARALRLTADAPLDARVILRRLVAADPASYGYLVDLSAAGDDYLGVALVGASPELLVARSGNRVTCQPFAGSAPRAADPEIDAANAAALAGSAKNRHEHQLVIDTMCAALEPLCEDLEMASEPQLTRTAAVWHLCTPITGHLRDTATTAIDLALALHPTPAVGGVPTGAAGELIAALEGDRGFYAGAVGWCDAHGDGRWVVSIRCAQLSADRRTAIAHAGGGIVAESDPDDEVEETTTKFATMLTALRVLQ

SEQ ID NO: 94336 - protein, 366 aa, unidentified
  source 1..366: note = Mycobacterium pseudokansasii
  REGION 1..366: note = tr|A0A498QK81|A0A498QK81_9MYCO Isochorismate synthase MenF OS=Mycobacterium pseudokansasii OX=2341080; GN = menF PE=4 SV=1
MSPIEPPFALCGPGRTLVADGVRTRYRDIRAAQAALRSGSVPMILGALPFDLSEPAALMEPTSVQHLDALPGWPTGPLSAVHISVAVPPLVEHRARISYARDQLAALDNPLRKVVLARALRLAADAPLDARVILRRLVAADPASYGYLVDLSAAGDDYLGAALVGASPELLVARSGDRVTCQPFAGSAPRAADPEIDAANAAALAGSAKNRHEHQLVIDTMYAALEPLCDDLKIASEPQLTRTAAVWHLCTPITGHLRETTTTAIDLALALHPTPAVGGVPTSAAGELIAALEGDRGFYAGTVGWCDARGDGTWVVSIRCAQLSADRRTAIAHAGGGIVAGSDPDDEVAETTMKFATILTALGVQQ

SEQ ID NO: 94337 - protein, 377 aa, Mycobacterium simiae
  REGION 1..377: note = tr|A0A5B1BVC4|A0A5B1BVC4_MYCSI Isochorismate synthase OS=Mycobacterium simiae OX=1784 GN=F0Q45_04550; PE = 4 SV=1
MRTGRARVCRRLRSNEPPFALCGPGGTLVVDGVRARYHDVRAAHAALHSGKAPILLGALPFDVNAPAALMVPDTVQRLETLPGWPTGPLPAVSISAAIPPLAEHRARINHARRRLAAQDNPLRKVVLARTLRLTADAPLDARVILRRLVIADPTSYGYLVDLSAAGADYPGTALVGASPELLVARFGDQVVCQPFAGSAPRAADPQVDAANATALASSAKNRHEHQLVIDAMRAVLAPLCDDLEIASEPQLTRTAAVWHLRTPIRGRLRDTCTTAMDLALALHPTPAVGGVPTVAASELIAALEGDRGFYAGAIGWCDARGDGQWVVSIRCAQLSADRRTALAHAGGGIVAESNPDDEVEETTTKFGTILTALGVKQ

SEQ ID NO: 94338 - protein, 367 aa, Mycobacterium sp.
  REGION 1..367: note = tr|A0A557XEU1|A0A557XEU1_9MYCO Isochorismate synthase OS=Mycobacterium sp. 16-83 OX=2592811; GN = FPZ47_22415 PE=4 SV=1
MSTCSEPPFALSGPRGTLVADGVRDRFCDVRAAQAALRSGSAPIVLGALPFDTDKPAALLAPVGVARTEGPPDWPTGPLPAVRVTAAVPPPADYRDRISRARDRLRAPGGPLHKVVLARALELAADAPLDARVVLRRLIAADPAAYGYLVDLTGAGGDYGGVALVGASPELLVARAGDRVACRPFAGSAPRDADPDRDAANGATLAGSAKNRHEHQLVIDAIRDALEPLCDDLTIAPEPHVSRTAAVWHLCTPISGRLRDTSTTAIDLALALHPTPAVGGVPTRAATELIAEMEGDRGFYAGAVGWCDARGDGTWVVSIRCAQLSADRRTALARAGGGIVAESDPDDEVDETTTKFATILAALGVRS

SEQ ID NO: 94339 - protein, 154 aa, unidentified
  source 1..154: note = Mycobacterium talmoniae
  REGION 1..154: note = tr|A0A2S8BJC2|A0A2S8BJC2_9MYCO Isochorismate synthase MenF OS=Mycobacterium talmoniae OX=1858794; GN = menF PE=4 SV=1
MASGKNRHEHQLVIDTMRDALQPLCTDLRIAATPQLSHTAALWHLSTPITGRLRDTATTALDLALALHPTPAVGGVPTDAAVQLIGALEAIAGSTPVRSGGVTGTGTAAGWWRSAARSCPPIGAPRWRIPAAALSPDPIPTTKSTRPQRNSRRF

SEQ ID NO: 94340 - protein, 450 aa, Mycobacterium tuberculosis; identical to SEQ ID NO: 94322
  REGION 1..450: note = sp|P9WFX1|MBTI_MYCTU Salicylate synthase; OS = Mycobacterium tuberculosis (strain ATCC 25618 / H37Rv); OX = 83332 GN=mbtI PE=1 SV=1

SEQ ID NO: 94341 - protein, 352 aa, Mycobacterium ulcerans
  REGION 1..352: note = tr|X8F2U1|X8F2U1_MYCUL Salicylate synthase; OS = Mycobacterium ulcerans str. Harvey OX=1299332; GN = I551_5926 PE=4 SV=1
MLLETDQVFGWVAFEFGLYRYGLQARLAPGTPLARVFWPRTRIVVTRDDVSLFGAERHEREAVLRLLRDGLPTVPRSRTIDLSADPSGYRDRVAVAVREIASGAYHKVILSRCVEVPFRLDFPSTYRRGRERNTPVRSFLLRLGGIRALGFSPELVTAVSPSGVVVTEPLAGTRALGRGAAHDRLARGDLESNAKEIVEHAISVRTSLHEITEVAEPGTAAVIDFMSVRERGSVQHLGSTISARLDAASDRMNALEALFPAVTASGIPKADGVDAILRLDEGPRGLYSGAVVMLSADGGLDAALTLRAAYERDGRTWLRAGAGIIEASQPEREFEETCEKLFTLAPYLVERQ

SEQ ID NO: 94342 - protein, 365 aa, Mycobacterium xenopi
  REGION 1..365: note = tr|A0A2X1V598|A0A2X1V598_MYCXE Isochorismate synthase OS=Mycobacterium xenopi OX=1789 GN=entC PE=4 SV=1
MDSQPPFVLSGPSGVLIADGVERRFSDVFAAQAALRAGHTPIVLGALPFDISQPAALIVPRAVRHAETLPDWPSGPLPAVRVAAAIPSPEQHRTPVQQARNRIAAPGSTLSKVVLARALQLVADAPLDARAILRRLVAADPATYGYLVDLTPGGGRSSGATLVGASPELLVARDGDRITCRPFAGSAPRAADPRLDEAAGAALASSAKNRHEHQLVVDSMRAALQPLCDDLTIAPSPQLRRTATVWHLSTPISGRLRDSSTTAIDLALALHPTPAVGGVPTKQACELITTLEGDRGFYAGAVGWCDGRGDGRWVVSIRGAQLSADRRGVLAHAGGGIVAESDPDDEVDETTTKFATILAALGVQH

SEQ ID NO: 94343 - protein, 281 aa, unidentified
  source 1..281: note = Mycobacteroides abscessus
  REGION 1..281: note = tr|A0A1N4ZE23|A0A1N4ZE23_9MYCO Probable isochorismate synthase EntC OS=Mycobacteroides abscessus subsp. abscessus OX=1185650 GN=dhbC_1 PE=4 SV=1
  VARIANT 2: note = Xaa can be any naturally occurring amino acid
MXPAPSEHLRRVTEAVEVLRSDAGLAKVVLARVLELRAESPVDPLVLTHRLIRNDPDANSFCVDLSPAGDRFRGHTMVGCSPELLVERRGDMVICHPFAGSAPRSNDPSQDRRTGEDLAGSHKNRHEHSVVIDQLREDLASLCVDVQVPPEPTLSRTAALWHLSTSISARLRQSSTTALDLALALHPTPAVCGTPTEAAADLIARIEGDRGFYAGAIGWCDRNGDGRWVVTIRCAELSADGTAIRAYAGGGLVAESDPQDELSETTVKFRTVLAALGAKID

SEQ ID NO: 94344 - protein, 369 aa, unidentified
  source 1..369: note = Mycobacteroides chelonae
  REGION 1..369: note = tr|A0A4Y6IQJ4|A0A4Y6IQJ4_MYCCH Isochorismate synthase OS=Mycobacteroides chelonae OX=1774; GN = FJK96_18540 PE=4 SV=1
MTATDSPAYPHFVMSRAADALYAYGRERAYDDVASAAEALRAGRHRMLVGALPFDTSRPAALTVPATVERGQPHEFYGTMPNIHVTHQVPEPSEHLRRVTEAVEVLRDTAGGLSKVVLARVLELQADAPVDALVLTHRLIRNDPDANSFCVDLSPAGERFRGHTMVGCSPELLVERHGDMVICHPFAGSAPRSSDPSQDRRTGEDLAGSHKNRHEHSVVIDQLREDLSSLCVDVQVPPEPTLSRTAALWHLSTSISARLRQSSTTALDLAMALHPTPAVCGTPTEAAADLIARIEGDRGFYAGAVGWCDSSGDGRWAVSIRCAELSADGTAIRAYAGGGLVAESDPQDELSETTVKFRTILAGLGAQSE

SEQ ID NO: 94345 - protein, 369 aa, unidentified
  source 1..369: note = Mycobacteroides franklinii
  REGION 1..369: note = tr|A0A4R8R2F6|A0A4R8R2F6_9MYCO Isochorismate synthase OS=Mycobacteroides franklinii OX=948102 GN=dhbC; PE = 4 SV=1
MTATNSPAHPHFVMSRATDALYAYGRDTTYDDVSNAAEALRSGRHHMLVGALPFDTTEPAALTVPVTVQRGQPQEFYGTMPNIHVTQQIPEPSEHLRRVTEAVEVLRDSRAGLSKVVLARVLELRADAPVDPLVLTHRLIRNDPDANSFCVDLSPAGDRFRGHTMVGCSPELLVERRGDMVICHPFAGSAPRSKDPSLDRRTGEDLAGSHKNRHEHSVVIDQLREDLASLCVDVQVPPEPTLSRTAALWHLSTAISARLRQSSTTALDLALALHPTPAVCGTPTKGAADLIARIEGDRGFYAGAVGWCDGNGDGRWAVSIRCAELSADRTAIRAYAGGGLVAESDPQDELSETTVKFRTVLAGLGAEIE

SEQ ID NO: 94346 - protein, 380 aa, unidentified
  source 1..380: note = Mycobacteroides salmoniphilum
  REGION 1..380: note = tr|A0A4R8SF80|A0A4R8SF80_9MYCO Isochorismate synthase DhbC OS=Mycobacteroides salmoniphilum OX=404941; GN = dhbC PE=4 SV=1
MTATDSPVHPHFVMSRAAEALYAYGRETAYDDIASAADALRTGRHHMLVGALPFDTSKPAALTVPATVERGQPQEFYGTMPNIRVTQQIPEPSEHLRRVTEAVEVLRDTASGLSKVVLARVLEMQADTPVDALVLTHRLIRNDPDANSFCVDLSPAGDRFRGHTMVGCSPELLVERRGDMVICHPFAGSAPRSSDPSLDRRTGEDLAGSHKNRHEHSVVIDQLREDLASLCVDVQVPPEPTLSRTAALWHLSTSISARLRQSSTTALDLAVALHPTPAVCGTPTEAAANLIARIEGDRGFYAGAVGWCDSSGDGRWAVSIRCAELSADGTAIRAYAGGGLVAESDPQDELSETTVKFRTILAGLGAELDEPLGRRESNSE

SEQ ID NO: 94347 - protein, 373 aa, unidentified
  source 1..373: note = Mycolicibacter arupensis
  REGION 1..373: note = tr|A0A5C7Y2N0|A0A5C7Y2N0_9MYCO Isochorismate synthase OS=Mycolicibacter arupensis OX=342002; GN = E6Q54_11660 PE=4 SV=1
MRPSSAAFVLSGSSGTLSAEAAVAGFPDVAEAQAALTAGRAPIVVGALPFRPGAAAALFVPRGLRREQALPPVPTVALPEVRVVGQVPTPEEHRARIQRVLEELNAPHSALHKVVLARGLRLSADAPLNGDALLRRLIAADPSSYGYLVDLSAAGDPYTGTVLVGASPELLVARDGDRVTCRPFAGSAPRSADAEIDAANGAALAASGKNRHEHQLVVDQLRAALAPLCTELDVAPEPLLSSTAAVWHLNTPITGRLRDTATTALDLALALHPTAAVGGVPTAAAVDLITEVEDDRGFYAGAVGWCDAAGDGRWVVAIRCAQLSADRRSALAHAGGGIVAESDPDEELAETVTKFGTILSAMGVGRPTAAPPD

SEQ ID NO: 94348 - protein, 365 aa, unidentified
  source 1..365: note = Mycolicibacter terrae
  REGION 1..365: note = tr|A0A240AQI4|A0A240AQI4_9MYCO Isochorismate synthase EntC OS=Mycolicibacter terrae OX=1788 GN=entC; PE = 4 SV=1
MLSGPAGTLVADGIATGFCDVGAAQTALTSGEAPIVVGALPFRPGGAAALFVPSAVRHDMALATRPDAALPAVRVVAQLPEPDEHRARIRRALHELTAAPGALHKVVLARGLRLAADAPLDPGTVLRRLVAADPSGYGYLVDLSAAGDGYAGAALVGASPELLVARDGDRVTCRPFAGSAPRSPDPAADAANGAALADSGKNRHEHQLVVDQLRAALEPLCTDLDIAPAPRLTGTAAVWHLSTPITGRLRDTATTALDLALALHPTAAVGGFPTAAALELIAELEGDRGFYAGAVGWCNADGDGAWVVSIRCAQLSADRRSALAHAGGGIVAESDPDEELAETVTKFSTILSALGVAPPSAPPRD

SEQ ID NO: 94349 - protein, 364 aa, unidentified
  source 1..364: note = Mycolicibacterium aichiense
  REGION 1..364: note = tr|A0A378RB00|A0A378RB00_9MYCO Isochorismate synthase DhbC OS=Mycolicibacterium aichiense OX=1799; GN = dhbC PE=4 SV=1
MTLPSFVLSGPAGTVVAEGIRTGYDDVAAAAAALADGSADVVVGALPFDIRSRAALMTPMTVTFGDALPSWSTAPLPAVRIEAMVPAPAEHRARIRAALDRLSAPESALQKVVLARALRLVADGPLDARAILDRLVAADPEACAYLADLSVAGGDHTGTALVGASPELLVARSGEVVTCQPFAGSAPRSPDPQADAANGAALSESGKNRHEHQLVVDTMRAALEPLCVDLEIAPQPQLSRTAALWHLSTPIRGRLRDTATTAIDLALALHPTPAVGGVPTAAAVDLIAQLEGDRGFYAGAVGWCDARGDGRWVVAIRGAQLSADRWGALAQAGGGIVAESDADDEVAETTTKFRTILSALGVQK

SEQ ID NO: 94350 - protein, 365 aa, unidentified
  source 1..365: note = Mycolicibacterium aurum
  REGION 1..365: note = tr|A0A3S4RK54|A0A3S4RK54_MYCAU Isochorismate synthase OS=Mycolicibacterium aurum OX=1791 GN=dhbC PE=4; SV = 1
MTREPTFVLAGPDDVVVADGVHTAFPHIADARAALASHSAPIILGALPFDVNQPAALIRPQSVRFSDVLPQWPLRELAPAQITETTPDADEHRRRIGLALARLRDPADDLHKVVLARALQLSADGRLDARTVLHRLAADDAQATKYLVDLSAAGDGYSGTVLVGASPELLVARRGSQVMCRPFAGSAPRLADPDADAASGAALAASEKNRHEHQLVVDALRTALEPLCTDLQFAERPELSKTAAVWHLATPISGRLREKSTTALDLAVALHPTPAVGGSPTDQAVALIGELERDRGFYAGTVGWCDQRGDGRWVVSIRCAQLSADRRTATAHSGGGIVAESDPDDEVDETTTKFRTILSALGVKQ

SEQ ID NO: 94351 - protein, 365 aa, unidentified
  source 1..365: note = Mycolicibacterium chitae
  REGION 1..365: note = tr|A0A448I9P8|A0A448I9P8_MYCCI Isochorismate synthase DhbC OS=Mycolicibacterium chitae OX=1792 GN=dhbC; PE = 4 SV=1
MTAPPPSFVLSGPSGTVLSRGVRAAFDSVAAATTALDRGEVPIVVGALPFDVASPAALHAPEQLHRGPLTAPAGGRLPRVTEVSPQPDLATHRDRVATAVARLRAPGTDLHKVVLARSLRLHADGPWDPTTVLHRLLDADPGAYGYLVDLSPAGGAHAGTVLVGASPELLVARSGDRVTCRPFAGSAPRSADPEIDRANSTALAESAKNRHEHQLVIDVMRAALEPLCVDLDIAAEPQLHHTDALWHLNTPISATLRESSTTAIDLALALQPTPAVGGVPTAAATALIGEIEGDRGFYAGAAGWCDARGDGRWVVSIRCAQLSADRRSALAHSGGGIVAESDPDDEVAETTTKFRTILSGLGVTL

SEQ ID NO: 94352 - protein, 366 aa, unidentified
  source 1..366: note = Mycolicibacterium chlorophenolicum
  REGION 1..366: note = tr|A0A0J6VTC0|A0A0J6VTC0_9MYCO Isochorismate synthase DhbC OS=Mycolicibacterium chlorophenolicum; OX = 37916 GN=dhbC PE=4 SV=1
MTREPTFVLAGPDGVITAEGVHTAFPRIADARAALASHSAPIIVGALPFDLTAPAALIRPQTVRFTDTLPSWPLRELATTRITETTPDADEHRRRIAVALQRLRDTDSGLHKVVLARALRISADGPLDARTVLHRLAGADAQATKYLVDLSAAGDGYSGTALVGASPELLVARNGLQVTCRPFAGSAPRRADPDGDAASGAALADSAKNRHEHQLVVDALREALDPLCTDVQIADQPQLTRTAAVWHLYTPITGRLREKTTTALDLALALHPTPAVGGSPTTAATALISELEGDRGFYAGTVGWCDQRGDGRWVVSIRCAQLSADRRSALAHSGGGIVAESEPDDELDETTTKFRTILSALGVPDD

SEQ ID NO: 94353 - protein, 366 aa, unidentified
  source 1..366: note = Mycolicibacterium chubuense
  REGION 1..366: note = tr|A0A0J6WQZ8|A0A0J6WQZ8_MYCCU Isochorismate synthase DhbC OS=Mycolicibacterium chubuense OX=1800; GN = dhbC PE=4 SV=1
MTREPTFVLAGPDGVITAEGVHTAFPRIADARAALASHSAPIIVGALPFDLTAPAALIRPQTVRFTDTLPSWPLRELGTTRITETTPDADEHRRRIAVALQRLRDADSGLHKVVLARALRISADGPLDARTVLHRLAGADAQATKYLVDLSAAGDGYSGTALVGASPELLVARNGLQVTCRPFAGSAPRRADPDEDAASGAALADSAKNRHEHQLVVDALREALDPLCTDVQIADRPQLTRTAAVWHLYTPITGRLREKATTALDLALALHPTPAVGGSPTTAATALISELEGDRGFYAGTVGWCDQRGDGRWVVSIRCAQLSADRRSALAHSGGGIVAESEPDDELDETTTKFRTILSALGVPDD

SEQ ID NO: 94354 - protein, 364 aa, unidentified
  source 1..364: note = Mycolicibacterium flavescens
  REGION 1..364: note = tr|A0A3S5EHU7|A0A3S5EHU7_MYCFV Isochorismate synthase family protein OS=Mycolicibacterium flavescens; OX = 1776 GN=dhbC PE=4 SV=1
MTREPSFVLASRGAVVAEGVHTAFPKVAEARAALASHSAPIIVGALPFDMTKPAALIRPQSVQFLDALPDWPLRPMPGVQIAEALPDPDEHRARVASAVDRLNSPSSGLHKVVLARALRLAADGPLDARTVLHRLVGADPAANGYLADLTAAGGGYSGSVLVGASPELLVARRGDQVVCAPFAGSAPRSPDPDTDEANGAALAASAKNLREHQFVVDTIRDALEPLCADLEVAAEPALRKTDSVWHLATRITGTLRERSITALDLAIALHPTPAVGGVPTADAADLIAELEGDRGFYAGAVGWCDQRGDGRWVVSIRCAALSADRRTAEAYSGGGIVAESDPDDELAETTTKFTTILAALGAAT

SEQ ID NO: 94355 - protein, 322 aa, unidentified
  source 1..322: note = Mycolicibacterium fortuitum
  REGION 1..322: note = tr|A0A378U668|A0A378U668_MYCFO Isochorismate synthase OS=Mycolicibacterium fortuitum OX=1766 GN=entC; PE = 4 SV=1
MLGALPFNPAAAAALYEPDTVRFTGSLPDWTASPPPAVVDRQTLPPGSVHRERVAEAIRQLRDPLVPIDKVVLARALRLTASSAWDVRSVLRRLADADPAATVYLADLTPAGDTYTGTALVGASPELLVAREGEMVICRPFAGSAPRSDDPAVDAANATALAASAKNRHEHQLVVDVMRQALEPLCADLQIADEPELHGTDALWHLSTPVVGRLREKRTTAIDLALALHPTPAVGGVPADRAAALIGELEGDRGFYAGAVGWCDSSGDGRWVVSIRCAVLSADRYTALASAGGGIVAESDPDDEVDETTTKFRTILTGLGAT

SEQ ID NO: 94356 - protein, 365 aa, unidentified
  source 1..365: note = Mycolicibacterium gilvum
  REGION 1..365: note = tr|A0A378SIB0|A0A378SIB0_9MYCO Isochorismate synthase OS=Mycolicibacterium gilvum OX=1804 GN=dhbC PE=4; SV = 1
MTREPTFVFAGPDGVVVGEGVHTAFPHIADARAALASHSSPIVVGALPFDLSRPAALMRPQSVRFTDVMPEGPGRELASTEITETSPDADEHRRRIGVALARLRDPADPLDKVVLARALLLTAQGRLDARTVLDRLASADAQATKYLVDLSAAGEGYSGTALVGASPELLVARHGRQVLCRPFAGSAPRRPDPEDDAASGAALVESDKNRHEHQLVVDALRAALEPLCTDLQIAPRPQLTRTAAVWHLYTPITATLRERSTTALDLAVALHPTPAVGGSPTDRAVALIDELEGDRGFYAGAVGWCDQRGDGRWVVSIRCAQLSADRHTALAHSGGGIVAESDPGAELDETTTKFRTILSALGVES

SEQ ID NO: 94357 - protein, 365 aa, unidentified
  source 1..365: note = Mycolicibacterium hassiacum
  REGION 1..365: note = tr|K5BKB8|K5BKB8_MYCHD Isochorismate synthase MenF; OS = Mycolicibacterium hassiacum (strain DSM 44199 / CIP 105218 / JCM 12690 / 3849) OX=1122247 GN=dhbC PE=4 SV=1
MTREPSFILATDGGAVVADGIHTAFPVVADAKAALASHSAPIIVGALPFDLTAPAALIRPQSIRFLDALPTWPLRPLPEVTIAEARPETDEHRARISRALRRLRDPDDALQKVVLARTLRLVADGHLDARTVLHRLAGADPTANAFLADLTAAGAAYSGTALVGASPELLVARRGDRVLCAPFAGSAPRHADPETDAASGARLAASAKNRHEHRLVVEAIREALEPVCSELQIAPEPRLDKTAAVWHLYTPITAQLREKSITALDLALRMHPTPAVGGVPAAPAAELIAELEGDRGFYAGAVGWCDRRGDGRWVVSIRCAQLSADRRSALAYSGGGIVADSDPEDELAETTTKFATILTAMGVPT

SEQ ID NO: 94358 - protein, 364 aa, unidentified
  source 1..364: note = Mycolicibacterium hodleri
  REGION 1..364: note = tr|A0A502EAF6|A0A502EAF6_9MYCO Isochorismate synthase OS=Mycolicibacterium hodleri OX=49897; GN = EAH80_13220 PE=4 SV=1
MTVEPSFVLAGHDGVVVAEGVVSAYPRLSDAQAALASGEAPIILGALPFDVTRPTALMRPEHVRFTETLPDWSPKNMPAVHIAETVPAPAEHRARIAAALERLRDPDSPLHKVVLARALRLVADGTLDVGTILHRMAEDHSATTYFVDLSAAGGEHAGTALIGASPELLVARRGDLLSCKPFAGSAARSTDFAVDRANGAALANSTKNLHEHQLVVDQMRAALQPLCVDLDIASTPELSNTSAVWHLSTPITGRLRDSSTTALDLAVALHPTAAVGGVPTREAVDLIGTLEGDRGFYAGAVGWCDASGDGMWVVSIRCAELSADRRTAEARSGGGIVAESDPDDEVAETNTKFRTILTALGVST

SEQ ID NO: 94359 - protein, 362 aa, unidentified
  source 1..362: note = Mycolicibacterium mageritense
  REGION 1..362: note = tr|A0A5C7Y9Z3|A0A5C7Y9Z3_9MYCO Isochorismate synthase OS=Mycolicibacterium mageritense OX=53462; GN = E6Q55_23340 PE=4 SV=1
MTPSFVLAGPAGAVIADGVRTAFSRISDAQAALRSGNAPIILGALPFDLTSAAALYEPDAFTHAGALPDWPAGTPPTVLSRETLPPSTVHRDRVAEAVRRLRDPAAGLDKVVLARALRLVADAPWDTRAVLRRLADADRAATVYLADLSASGDPRVGTVLVGASPELLVARHGDMVICQPFAGSAPRSADPEVDRANAMALAASGKNRHEHELVVDVMREALDPMCAELQIAVEPELHGTDALWHLSTPIRGRLRDKHTTAIDLALALHPTPAVGGVPAAAAATVIRELEGDRGFYAGAVGWCDAAGDGRWVVSIRCAQLSADRCTALAHAGGGIVAESDPDDELDETTTKFRTILTGLGAA

SEQ ID NO: 94360 - protein, 365 aa, unidentified
  source 1..365: note = Mycolicibacterium moriokaense
  REGION 1..365: note = tr|A0A370CXL5|A0A370CXL5_9MYCO Isochorismate synthase OS=Mycolicibacterium moriokaense OX=39691; GN = DVS77_14650 PE=4 SV=1
MTREPTFVLATGGSAVVAEGVHTAYKSVADARTSLTSHSAPIIVGALPFDISRPAALIRPQDVQFLDALPKWPLRDLPAVRVAEMLPEPDEHRARVAAAVARLRDPASGLHKVVLARALRLVADGPLDARTIVDRLVAADPAAYAYLADLTAAGTEHSGTVLVGASPELLVARHGERVMCAPFAGSAPRLADPDADHASGEALAASAKNRHEHELVVDAMRKALDPLCVDLQIPTTPQLSRTAAVWHLSTPITGRIREKATTALDLALALHPTPAVGGAPAGAAADLIGEIEGDRGFYAGAVGWCDQRGDGRWVVSIRGAQLSADRRTALAHAGGGIVAESDPDDEVTETTTKFTTILSALEAQP

SEQ ID NO: 94361 - protein, 361 aa, unidentified
  source 1..361: note = Mycolicibacterium mucogenicum
  REGION 1..361: note = tr|A0A4R5WGK5|A0A4R5WGK5_9MYCO Isochorismate synthase OS=Mycolicibacterium mucogenicum OX=56689; GN = EUA03_13330 PE=4 SV=1
MTRVFVLAGPDGVMLADGPARAFPDLADARRALAAGEVPILVGALPFDLDSPAALMAPASVTHADALPFTADRLPAVRIAASLPSPDEHRARVAAAVRALRDPAAGLHKVVLARALELVADDVLDPYVVLSRLADDHSATAFFTDLSAAGAPYSGTALLGASPELLVARRGDVVTCKPFAGSAPRSADPETDAANGAALAASAKNRHEHQLVVDIMREALEPLCSELDIAAEPQVSATTAVWHLSTPIVGRLRETSTTALDLAIALHPTPAVGGVPTQAAARLIHELEGDRGFYAGAVGWCDSAGDGRWVVSIRCGQLSADRLSIDARAGGGIVAESDPDDEVTETTTKFRTMLTALGVPV

SEQ ID NO: 94362 - protein, 366 aa, unidentified
  source 1..366: note = Mycolicibacterium obuense
  REGION 1..366: note = tr|A0A0J6WF42|A0A0J6WF42_9MYCO Isochorismate synthase DhbC OS=Mycolicibacterium obuense OX=1807 GN=dhbC; PE = 4 SV=1
MTREPTFVLAGPGEVVVADGVHTAFPRIADARAALASHSAPMIVGAVPFDLSQPAALIRPQTIRFTPDLPSWPLRELPATRITATTPDGAEHRRRVALAVARLADPATALHKVVLARAVTVTADGPLDARTLLHRLAGNDAQATKFLVDLSAAGEGHSGTALIGASPELLVARRGQQVTCRPFAGSAPRLADPDADAKSGAALADSAKNRHEHRLVVDALREALAPLCTDLQIAEQPQLTKTAAVWHLYTPISGRLRQASTTALDLAVALHPTPAVGGSPTAAATELITELEGDRGFYAGAVGWCDQRGDGCWVVSIRCAQLSADRRSAVAHSGGGIVAESDPDDELAETTTKFKTILAALGVRDD

SEQ ID NO: 94363 - protein, 450 aa, unidentified
  source 1..450: note = Mycolicibacterium paratuberculosis
  REGION 1..450: note = sp|Q73XV3|MBTI_MYCPA Salicylate synthase; OS = Mycolicibacterium paratuberculosis (strain ATCC BAA-968 / K-10) OX=262316 GN=mbtI PE=3 SV=1
MTEVSVETTSAGSESPSIPLPVHIDPADLAAELAVVLSERAGEEYLLYERGGEWVLATGVRAMIELDSDELRVIRDGVTQRQHWSGRPGPVLGEAIDRLLLETDQLFGWIAFEFGVYRYGLQQRLAPGTALARVFWPNGRIVVTREAIQLFGTSTGRRDDVLGVLGDGVPGLRDASAVDVVTDPSNYRDRVASAVAEIAAGRYHKVILSRCLQVPFAVDFPSTYRLARRHNTPVRSFLLRLGGIRAVGYSPELVAAVRHDGVVVTEPLAGTRAFGRGALHDRQARDDLESNSKEIVEHAISVRSSLQEMAEIAEPGTAVVTDFMTVRERGSVQHLGSTVSGRLGTSNDRMDALEALFPAVTASGIPKAGGVEAILRLDEGPRGLYSGAVVMVSADGALDAALTLRAAYEHDGKTWLRAGAGIIEESTPEREFEETCEKLSTLAPYLIARQ

SEQ ID NO: 94364 - protein, 361 aa, unidentified
  source 1..361: note = Mycolicibacterium peregrinum
  REGION 1..361: note = tr|A0A4Z0HN25|A0A4Z0HN25_MYCPR Isochorismate synthase OS=Mycolicibacterium peregrinum OX=43304; GN = EJD94_20300 PE=4 SV=1
MNPSFVLAGPNGAVLAEGVRTGFADIADAQAALRSGTPIVLGALPFDPATPAALYEPDAVRFTDALPDWPVNPPPAAVERETVPPGSVHRERVAEAIRRLRDPQIPIDKVVLARSLRLSADSAWDVRTVLRRLADADPAATVYLADLSPAGGANAGTALVGASPELLVAREGETVICQPFAGSAPRSADPAVDAANATALAASAKNRHEHQLVVDVMRQALEPLCVDLQIAEEPQLHGTDALWHLSTPVVGRLREKRTTAIDLALALHPTPAVGGVPTDRAAALISELEGDRGFYAGAVGWCDSSGDGRWVVSIRCAVLSADRYTALASAGGGIVAESDPDDEVDETTTKFRTILTGLGAT

SEQ ID NO: 94365 - protein, 369 aa, unidentified
  source 1..369: note = Mycolicibacterium phlei
  REGION 1..369: note = tr|A0A3S4V0Q0|A0A3S4V0Q0_MYCPH Isochorismate synthase EntC OS=Mycolicibacterium phlei OX=1771 GN=dhbC; PE = 4 SV=1
MTATDSPAYPHFVMSRAADALYAYGRERAYDDVASAAEALRAGRHRMLVGALPFDTSRPAALTVPATVERGQPHEFYGTMPNIHVTHQIPEPSEHLRRVTEAVEVLRDTAGGLSKVVLARVLELQADAPVDALVLTHRLIRNDPDANSFCVDLSPAGERFRGHTMVGCSPELLVERRGDMVICHPFAGSAPRSSNPSQDRRTGENLAGSHKNRHEHSVVIDQLRADLSSLCVDVQVPPEPTLSRTAALWHLSTSISARLRQSSTTALDLAMALHPTPAVCGTPTEAAADLIARIEGDRGFYAGAVGWCDNSGDGRWAVSIRCAELSADGTAIRAYAGGGLVAESDPQDELSETTVKFRTILAGLGAHSE

SEQ ID NO: 94366 - protein, 363 aa, unidentified
  source 1..363: note = Mycolicibacterium rhodesiae
  REGION 1..363: note = tr|G4HVP0|G4HVP0_MYCRH Isochorismate synthase; OS = Mycolicibacterium rhodesiae JS60 OX=931627; GN = MycrhDRAFT_1109 PE=4 SV=1
MAQPSFVLSGPAGTVVADGIQTGYDDVAAAATALADGSADVVVGALPFDIRGKAALLSPTSVTFTDKLPAWPTAAPAPVRIAEALPSPEEHRARIRTALGRLTDPESGLQKVVLARALRLVADDPLDERAILQQLAADAEATAYLADLSPAGGDYTGCVLVGASPELLVARSGDLVTCQPFAGSAPRSADPQTDAANGAALAESGKNRHEHQLVVDTMRAALTPLCAELDVAAHPQLSHTAALWHLSTPIRGRLRDTAITAIDLALALHPTPAVGGVPTQDAVDLIAELEGDRGFYAGAVGWCDARGDGRWVVAIRGAQLSADRREALAQAGGGIVAESDADDEVAETTTKFRTILSALGVQQ

SEQ ID NO: 94367 - protein, 361 aa, unidentified
  source 1..361: note = Mycolicibacterium senegalense
  REGION 1..361: note = tr|A0A378W1Z3|A0A378W1Z3_9MYCO Isochorismate synthase OS=Mycolicibacterium senegalense OX=1796 GN=entC; PE = 4 SV=1
MNPSFVLAGPTGTVLGEGMRTGFADIADAQAALRHGTPIVLGALPFDLRAPVALFEPETVQVADALPLWNPSPLPSVLQRETLPPGPVHRERVAEAISRLRDPHDPIDKVVLARALRLTADSPWDVRGVLRRLAEADPAATVYLADLSAAGAAHTGTALVGASPELLVAREGERVICQPFAGSAPRSADPRTDAANAAALAASAKNRHEHQLVVDMMRRALEPLCVELQIADEPELHGTDALWHLSTPVIGRLREKHTTAIDLALALHPTPAVGGVPTDRATELISELEGDRGFYAGAVGWCDSRGDGRWVVSIRCAVLSADRYTALASAGGGIVAESDPDDEVDETTTKFRTILTGLGAT

SEQ ID NO: 94368 - protein, 367 aa, unidentified
  source 1..367: note = Mycolicibacterium smegmatis
  REGION 1..367: note = tr|I7G5C0|I7G5C0_MYCS2 Isochorismate synthase; OS = Mycolicibacterium smegmatis (strain ATCC 700084 / mc(2)155) OX=246196 GN=entC PE=4 SV=1
MSAPVSAPSFVFAGPSGVLIGEGVQTGFATIAGARAALTSGAADLVVGALPFDLTGPAALHAPASARVAGALPDWPTGTPPVLRTRETLPSGDVHRERVAEAVRRLRDADTPLDKVVLARALRLTAEAPWDPRTVLRRLADADPAATVYLADLSPAGDPHTGTVLVGASPELLVARDGDEVICRPFAGSAPRSADLETDRANAAALAASGKNRHEHELVVDVMRKALDPLCVDLQIAAQPELHATDALWHLSTPIRGRLRDKAITAIDLAVALHPTPAVGGVPTDLAASLITELEGDRGFYAGAVGWCDSAGNGRWVVSIRCAVLSADRRVALANAGGGIVAESDPDDEVDETTTKFRTILTGLGVQ

SEQ ID NO: 94369 - protein, 348 aa, unidentified
  source 1..348: note = Mycolicibacterium sp.
  REGION 1..348: note = tr|A0A3S0SJH9|A0A3S0SJH9_9MYCO Isochorismate synthase OS=Mycolicibacterium sp. OX=2320850; GN = EKK51_15870 PE=4 SV=1
MLADGPARPFPDLDEARRALAAGEVPILLGALPFDLDSPAALMAPDSVTYADALPFTADRLPAVRIAASLPSPDEHRARVAAAVRALRDPAAGLHKVVLARALELVADDVLDPYAVLSRLADDHSATAFFTDLSAAGAPYSGTALLGASPELLVARRGDVVTCKPFAGSAPRSADPETDAANGAALAASAKNRHEHQLVVDIMREALEPLCSELDIATEPQVSATTAVWHLSTPIVGRLRETSTTALDLAIALHPTPAVGGVPTEAAARLINELEGDRGFYAGAVGWCDGAGDGRWVVSIRCGQLAADRRSVDARAGGGIVAESDPDDEVTETTTKFRTMLTALGVPV

SEQ ID NO: 94370 - protein, 369 aa, unidentified
  source 1..369: note = Mycolicibacterium tokaiense
  REGION 1..369: note = tr|A0A378TA63|A0A378TA63_9MYCO Isochorismate synthase OS=Mycolicibacterium tokaiense OX=39695 GN=entC; PE = 4 SV=1
MTPGADEPSFVLSGPTGTVVASGVRTGYSDVAAAAAALRTRQAPIVLGALPFDASGPVALHTPESVAFTEALPAWPTHEPGAVRVEQTVPEATEHRRRVAEAVARLRDPDSTLRKVVLARSIRLSSAAGWDARTVLNRLRAADPAAYTYLADLTPAGENHLGAVLVGASPELLVARFGNQVRCRPFAGSAARSQDPEVDRARGAALAESAKNRYEHRVVVDAIRDALAPLCSDLEVDAEPQLHHTDALWHLSTRVTGTLREKSTTALDLALALHPTPAVGGHPTAEATTAIAEIEGDRGFYAGATGWCDADGDGRWVVSIRCAQLSADRHTATAHSGGGIVADSDPDDELDETTTKFHTIMTGLGAAHG

SEQ ID NO: 94371 - protein, 351 aa, Myroides odoratus
  REGION 1..351: note = tr|A0A378RL13|A0A378RL13_MYROD Menaquinone-specific isochorismate synthase OS=Myroides odoratus OX=256 GN=menF; PE = 4 SV=1
MRLYETWTQQIAEDKPFVLYKKPGQPHVIGLFQHDTTLHQVNPFTTSGFIVAPFYEGIRFYIPLAHATKIEEEVTVQLFESAAFELDYEAQPAKANFEDLVTRCVAAIKEDKFSKVVPARKEEVVLEINDIQPLFTKLLMAYPEAFCYVVYHPQIGMWMGATPETLVELKGQTLHTMALAGTQVNHGKEEVLWGEKEQEEQRYVTEFIVDKLQPLSTRIQVSDPFTKRAAKVMHICTDIEAELKEVNVQTVVEALHPTPAVCGMPKEVSREFLLKEEGYARKYYAGYLGELNSPTATGELHSQLFVNLRCMEIEKDHVNLYIGCGVTEDSDPISEFVETVNKSTTMKKVLF

SEQ ID NO: 94372 - protein, 108 aa, unidentified
  source 1..108: note = Myxococcaceae bacterium
  REGION 1..108: note = tr|A0A4Q5ZVE9|A0A4Q5ZVE9_9DELT Isochorismate synthase (Fragment) OS=Myxococcaceae bacterium OX=2484252; GN = EOO71_16025 PE=4 SV=1
MGTAPALTAESEQESLATRLLRDYDAGSSFFFATPKRTMLARGVFATVPHAGGTNSMEGLPARVAAVLDASREAAHDIPVAVGAVPFDGRVEAQLVVPMTLQRAGPLV

SEQ ID NO: 94373 - protein, 452 aa, unidentified
  source 1..452: note = Myxococcales bacterium
  REGION 1..452: note = tr|A0A4V2AIA8|A0A4V2AIA8_9DELT Isochorismate synthase OS=Myxococcales bacterium OX=2026763; GN = EOO73_19605 PE=4 SV=1
MTQRDSAHYPIPWLSRENAEAGTAQPLQWLSVPAPLLQAESLLGVAPEVDAWYWSDGAEEQVGLGVARRLVGSGAERFEQLDRSLAELWRVLEPCVAAEAGAPEPRVFGGLAFQTGRASLIPWVDFGEGQLVLPRLTYTRREGRAWLTLIAPPSELTPATERARLLDEAAKLVSAASRLEEAEAPGPFELAEPDPAEWREQIRQVKAAIASGEVQKIVLARRVLARFARELSPTRVLSRLRESGPGAPRFAFRVGGSTFIGSPPERVLEKRGLRLATEAVAGTLPASDPEAALRLVEDAKLLTEHAPVIQDLLERLRPVAVVDPLPERPIPYLARQVWHLKTPITATLQKPERALSLLSRIHPTPAVGGYPTRPAVRFIAEHEADERGWYAGPIGWIDAHDDAQFAVALRSGVISGKHAHLYVGAGIVSGSDSESELAETGWKLRVLLGALG

SEQ ID NO: 94374 - protein, 400 aa, Myxococcus fulvus
  REGION 1..400: note = tr|F8CAV4|F8CAV4_MYXFH Isochorismate synthase DhbC; OS = Myxococcus fulvus (strain ATCC BAA-855 / HW-1); OX = 483219 GN=LILAB_26320 PE=4 SV=1
MQTLAAQLLESYEAGSSFFFATPRRTLLARGTFATVPHLGGAGALARLPERVTAVLNEARQADHDIPVAVGAVPFDGSVPAQLVVPLTLQRAGPLEFAQDVPVQRPLTASYTVQPVPEPAAYLNGVAQALKLMQRGPLQKVVLSRSLHLNAAAPIDLRKLLRNLAQRNPSGYTFAADLPAMEGTPGAGPRTLIGASPELLVSRSGFQVVANPLAGSAARSPDPLEDQERAAALLKSPKDLHEHAVVIHAVAEALRPYCKTLNVPAGPSLVNTATMWHLSSRITGELADPSISSLTLAAAMHPTPAVCGYPTRLAHEAIGSIEPFERGYYTGTVGWCDATGDGQWAVTIRCAEASERSLRLFAGAGIVVGSTPESELAETEAKFRTMLHAMGLGQSAGVQS

SEQ ID NO: 94375 - protein, 414 aa, Myxococcus xanthus
  REGION 1..414: note = tr|Q1D690|Q1D690_MYXXD Isochorismate synthase; OS = Myxococcus xanthus (strain DK 1622) OX=246197; GN = MXAN_3646 PE=4 SV=1
MTPAEPKEQEHPMGPQTLAAQLLESYEAGSSFFFATPRRTLLARGTFATVPHQGGADALARLPVRVTAVLNDARQADHDIPVAVGAVPFDGSVPAQLVVPLTLQRAGPLVFDKDVPVQRPFSASYTVQPVPEPAAYLNGVAQALKLMQSGPLQKVVLSRSLHLNAAAPIDLRQLLRNLAQRNPSGYTFAADLPQQDGTRGAGLRTLIGASPELLVSRSGFQVVANPLAGSAARSADPLEDQERAAALLKSPKDLHEHAVVIDAVAEALRPYCKTLNVPAGPSLVNTATMWHLSSRITGELADPSISSLTLAAAMHPTPAVCGYPTRLAHEAIGSIEPFERGYYTGTVGWCDATGDGQWAVTIRCAEASERTLRIFAGAGIVVGSTPESELAETEAKFRTMLHAMGLGHGAGVQS

SEQ ID NO: 94376 - protein, 409 aa, unidentified
  source 1..409: note = Naasia sp.
  REGION 1..409: note = tr|A0A4S4FLS1|A0A4S4FLS1_9MICO Isochorismate synthase OS=Naasia sp. YIM 131853 OX=2565933; GN = E6C64_10705 PE=4 SV=1
MAVTTTALPIEAHELESLLALADPQNPLIWLRHGEGMIGLGEALRLSFEGPERFADAASAWRAVVGQAEIDDRVGVPGTGLVAFGSFAFAAGSAAASTLLVPRTIVGHRDGVSWLTRIALRDELGSDPAETPTPHEDGPAYPLEFIRGTLDAAGYARAVRAAVGRIEAGDVGKVVLARDIFAPIPADADLRHPLRRLATSYPDTWTFALDGLIGSSPETLVRVDHKAVSARVLAGSTGRRTDAAADRRAAEELADSEKNQQEHGFAVRSILESLGRHTSALTVSDPFTLRLPNIWHLASDLDGILADGSSSLDLLGALHPTAAVAGTPTPAALDLIDELEPFDRGVYAGPVGWVDARGDGEWAIALRCGVVADGRVTAYAGCGIVAGSEPQRELAETRLKFRPIVDAFA

SEQ ID NO: 94377 - protein, 404 aa, unidentified
  source 1..404: note = Nakamurella silvestris
  REGION 1..404: note = tr|A0A399UPQ7|A0A399UPQ7_9ACTN Isochorismate synthase OS=Nakamurella silvestris OX=1645681; GN = D1871_20530 PE=4 SV=1
MVRTVAAPGLPADLISSLPTPTGTLSFVSEGEGLVGWGEFARFTTSGPTAAEDIDRWWTDLCATLDVQVDVEGAGTGPVVFVSLGFADDDESVAIVPRTVLGCRDGRTFITTVGPVPALTGREPVRAPGQISYSDASVSIGDYTGAVGQAVERIKAGEADKVVLARDLLATAAEPVDQRFLLRRLADSYPTCWTFAVDGLLGATPEMLLRREGNEVSSRVLAGTAWPERAGEHTTGRVATGLLASAKDLSEHAYAVSSVSDVLGRISSDLRVPRHPHVLPLANLTHLATDIHGTIDPAAGRASSALMLAARLHPTAAVGGSPASAAKRLIAELEPMRRGRYAAPVGWMSADGDGEFGIALRCAQVSDRQVRMFAGCGIMAGSDPEVEAREAQIKMIPIRDALEG

SEQ ID NO: 94378 - protein, 437 aa, Nakamurella sp.
  REGION 1..437: note = tr|A0A3G8ZNN4|A0A3G8ZNN4_9ACTN Isochorismate synthase OS=Nakamurella sp. s14-144 OX=1902245; GN = EH165_12000 PE=4 SV=1
MSASLFPSAQTIDLAPQPTVESASRPAAFTAVTVQLPGSRDDLLTNVPVPTGVLSFLSEGEGLVGWGTYASFTASGPDAAAHIAAWWADLSADLIVSDDVGVPGSGPIVFISLGFDDTDTSVALVPQTVLGSRDGRRFRTTIGPATMAAPPAQLVPVTAPGRISYSDAAVSVSDYIEAVTAGISRIRAGELKKVVLAHDLVATAENVVDERYVLSRLSQAYPTCWTFAVAGLVGATPEMLLRRRGLRISSRVLAGTAWSDRAGAHTAGTVATGLLASSKDLAEHAYAVDSVASVLGAVSADLQVPGAPRALPLANLTHLATDITGTLPAESDGPSTSALALAAALHPSAAVGGFPKDVARGLIRELEPMERGRYAAPVGWMNAAGEGEFAIALRCAEISGNTVRMMAGCGIMADSDPEKEAREAQIKMIPVRDALEG

SEQ ID NO: 94379 - protein, 452 aa, unidentified
  source 1..452: note = Natrarchaeobius chitinivorans
  REGION 1..452: note = tr|A0A3N6M2I7|A0A3N6M2I7_9EURY Isochorismate synthase OS=Natrarchaeobius chitinivorans OX=1679083; GN = EA472_18980 PE=4 SV=1
MDRTPGGRRLAAESRSLADGEPIELVSRSCEVDDVSFAAVVDAADESRILWATPEGLEIAGRGVAAGFSAAGPDRYDAIRRQADRVFDRLEHGGPTVARPRAFGGFSFHDGSDADPPWTGFDPASFVVPQVFVTRDETDGIWLTAVADDREAVDARLERWRDRLTDGPTMCASGSAPGVESTERSTSPERWAEQISRALDRIDDGRLTKVVLAQALSVDLTVPVDVPATLERLRRQYPSCYRFLVGHGVGGTFFGAPPEQLVSKRGERVGTEALAGSAPRGRTPEADEEYAERMLADEKLRREHELVVDAIREQLGPLASELTVSDRTLRKLATIQHLRTPISATLETDRHVLELVEALHPTPAVGGVPPESAWETIHETETFDRGWYAAPVGWFDGSGDGEFAVALRSAITAGESATLFAGNGIVADSDPDDEWEEVQLKFRPILDELRER

SEQ ID NO: 94380 - protein, 452 aa, unidentified
  source 1..452: note = Natrarchaeobius halalkaliphilus
  REGION 1..452: note = tr|A0A3N6LLG5|A0A3N6LLG5_9EURY Isochorismate synthase OS=Natrarchaeobius halalkaliphilus OX=1679091; GN = EA462_07340 PE=4 SV=1
MERTSGGRGLAAESASVEHEEPIDLVSCSRDVTDVSFGAIVDTDDEPRILWTAPNGLEIAGRGVAARFTAAGPNRFERIRTSADRVFDALEHDGPPVARPRAFGGFSFHDGHAPNPPWTGFDAASFVVPRAFVTRDDTGGIWVTAVGNGPDDAYDRLDHWHERLTSGPAMRASGSGPGVTSTRRSTSPEEWNEQIESALGRIEDGRLTKVVLAQALSIDLESSVDVPTMLERLRRQYPNCYRFLVSHETGGTFFGAPPEQLVSKRDDRVETEALAGSVARGETPESDDELATRMLADEKLEREHELVVEAIRDQLEALACELAIGDRRVRKLNTIQHLRTPLSATLAGDHHVLELVEALHPTPAVGGVPPTNAWETIRQTEAFDRGWYAAPIGWFDADGNGEFAVALRSALAVDDTVTLFAGNGIVADSDPAEEWTEVQLKFRPILDELKTR

SEQ ID NO: 94381 - protein, 554 aa, Natrialba magadii
  REGION 1..554: note = tr|D3SU31|D3SU31_NATMM Isochorismate synthase; OS = Natrialba magadii (strain ATCC 43099 / DSM 3394 / CIP 104546 / JCM 8861 / NBRC 102185 / NCIMB 2190 / MS3); OX = 547559GN=menF PE=4 SV=1
MNRTSGEGELAGTAPSHDQDQDQDHHDRTPSSPSSLCGRSRELTDAAADISFGALLDADIDIESGADTGTGTNTDTDTDTDTDTDTGNRTDTTTHCHYKTRIQWATPGGLEIVGRGVAAQFTTTGPTRFDDVREQAARTFGALEYDGPAVARPRAFGGLSFHDSFEDAFERAGETNADTAAATAPWRGFTAASFVIPQVLVVRDDETTWLTAVGPDADTATERLDEWHDRLADASFPAMRSSGSPPGVTDTERTTSRAAWVEQVEDAIERIETTTLRKVVLAQSLSVGLADEIDVPATLERLRRRYPNCYRFLIDHNHARSSDGGGTFFGAPPERLVSKRGERVETEALAGSAPRGETPEADEEFADQLRDSEKVQHEHVLVAEAIRDQLTPVTSSLTIDEQQIRRLATIQHVRTPIEATLDDEVTHVLELVEALHPTPAVGGMPPDEAWETIRETEPFDRGWYAAPIGWFDGNGDGEFAVALRSGVATDERVTLFAGSGLVADSDPHDEWDEVQLKFRPILDELRPEEASTAQSERGSDQSATETDEERPQPR

SEQ ID NO: 94382 - protein, 454 aa, Natrialba sp.
  REGION 1..454: note = tr|A0A5D5AH77|A0A5D5AH77_9EURY Isochorismate synthase OS=Natrialba sp. ESP3B_9 OX=2448032; GN = FYC77_15145 PE=4 SV=1
MDRTSGEGQLTAESPADSNPDEQANDLVARSRAVGDVSFAAVVDDAELPRILWAAPDGLEIAGQGIAAHITATGPDRFDRLQAQAKQVFDTLEYHGSTVARPRAFGGFSFHDGHEPTPPWTGFAAASFVVPRAFVTRTERDGVWLTVVSDSVDEADDRLERWDDRLTEGPTMCSSGTGPGVVSTHRTTSPSAWASQIEHALDRIENDRLVKVVLAQALSVDLEAPVDVPETLERLRRRYPNCYRFLVGQRDGGTFFGAPPERLVSKHGADVETEALAGSAPRGETPESDDEYADRMFDDEKLQHEHDLVVRAIREQLDSLARELTIDDRRIRKLATIQHLQTPITATLERDRHVLELVEALHPTPAVGGVPPDRAWETIRETETFDRGWYAAPIGWFDGDGDGEFAVGLRSAVASGDTATLFAGNGIVADSDPDEEWEEVELKFRPILDELRDR

SEQ ID NO: 94383 - protein, 447 aa, Natrinema altunense
  REGION 1..447: note = tr|A0A482XWS4|A0A482XWS4_9EURY Isochorismate synthase OS=Natrinema altunense OX=222984 GN=ELS17_00965; PE = 4 SV=1
MDRSLGDGRLTGETGAVDAAGDLVSRSRELEDVSFSAILDGSAESRVQWATPGGLELVGRGVAARFTADGPDRFDRVRTQASRAFDGLVHDGPEAARPRAFGGVSFHDGHEPAPPWTGFDAASFVVPQVLVTRTDDGTWLTAVGNRSDDVDDRLERWHERLTALPAMRPSGSTPGVAATRRTTSPAAWTSQVEAVLERITDGRLTKAVLAQALSVTLEGPVDVPATLERLRRRYPNCYRFLVSHDIGGTFFGAPPEGLVSKRGQRVETEALAGSVPRGETPAEDEEHVDRMRADEKFQHEHGLVVDAIRKQLAPFARDLTVSDQTIRRLATIQHLQTPIEATLSGDRHVLEIVEALHPTPAVGGVPPDVAWETIRDTETFERGWYASPVGWFDADGDGEFAVAIRSGIAADGTVTLFAGNGIVGDSDPEEEWDEVQLKYRPILDELQ

SEQ ID NO: 94384 - protein, 447 aa, Natrinema pallidum
  REGION 1..447: note = tr|A0A4P9TFM4|A0A4P9TFM4_9EURY Isochorismate synthase OS=Natrinema pallidum OX=69527 GN=FGF80_10375; PE = 4 SV=1
MDRSLGDGRLTGDTASVDGADDLVSRSRELEGVSFSAILDGSAESRVQWATPGGLELVGRGVAARFTAAGPDRFDRVRTQASRAFDGLVHDGPEAARPRAFGGVSFHDGHEPAPPWTGFDAASFVVPQVLVARTDDGTWLTAVGNRSDNVDDRLERWHERLTALPAMRPSGSTPGVAATRRTTSPATWTSQVEAVLERIADGRLTKAVLAQALSVTLEGPVDVPATLERLRRRYPNCYRFLVSHDIGGTFFGAPPERLVSKRGQRVETEALAGSVPRGETPAEDEEYVDRMRADEKFQHEHGLVVDAIRKQLAPLARDLTVSDQTIRRLATIQHLQTPIEATLSGDRHVLEIVEALHPTPAVGGVPPDVAWETIRDTETFERGWYASPVGWFDADGDGEFAVAIRSGIAADGTVTLFAGNGIVGDSDPDEEWDEVQLKYRPILDELQ

SEQ ID NO: 94385 - protein, 447 aa, Natrinema versiforme
  REGION 1..447: note = tr|A0A4P8WI00|A0A4P8WI00_9EURY Isochorismate synthase OS=Natrinema versiforme OX=88724 GN=FEJ81_10720; PE = 4 SV=1
MDRSSGDGRLAGGTDPAGEADGLVSRSRELEDVSFSAILDGSAESRVQWATPDGLELVGRGVAARVTAAGTDRFDRIRTQARRAFDGLAHDGPEAARPRAVGGVSFHDGHEPDPPWTGFDAASFVVPQVLVTRTDDGTWLTAVGNRADEADDRLERWHERLRDLPAMRPSGSTPGVAATRRTTSQADWTTQVETALERIADGTLTKVVLAQALSVELEGPIDVPATVERLRRRYPNCYRFLVGHGIGGTFFGAPPERLVSKRGDRVETEALAGSVPRGETPAEDEEHVERMRADAKFQHEHGLVADAISDQLEPLARELTVREQTIRRLATIQHLRTPIEARLEGDRHVLELVEALHPTPAVGGVPPDAAWETIRETEPFERGWYAAPVGWFDADGDGEFAVALRSGVAADGTVTLFAGNGIVADSDPDEEWPEVELKFRPILDELR

SEQ ID NO: 94386 - protein, 445 aa, Natronococcus occultus
  REGION 1..445: note = tr|L0JZF9|L0JZF9_9EURY Isochorismate synthase family protein OS=Natronococcus occultus SP4 OX=694430; GN = Natoc_1679 PE=4 SV=1
MDRTLDGRQSAVDSRPDSGGLTSRSRELEDVSFGAVVEADDACRVQWATPDGLEVVGRGVAARFRARGPERFDEIRTQAEAAFDDLDHRGPVVARPRAFGGFSFHDGHDAGGVWHGFEAASFVVPAMLVTRSDDGTWLTAVANDAEDATRRLEDWHERLLELPAMRPSGSGPGVAETRRTTAIESWRAQVETALERIDAGELTKVVLAQALSVDLEGPIDVPATVERLRRRYPNCYRFLVGDGTSGTFFGAPPERLVSKRGDRVETEALAGSVPRGETPEADDDHAERMLDSEKLRREHGLVAEAIRDQLAPLASELTVAERTIRRLATIQHLQTPIEATLEADRHVLELVEALHPTPAVGGVPPGTALETIRETESFDRGWYAAPIGWFDAAGDGEFAVGIRSGLATDETVTLFAGNGIVADSDPEEEWEEVQLKFRPVLDELK

SEQ ID NO: 94387 - protein, 451 aa, Natronolimnobius sp.
  REGION 1..451: note = tr|A0A4S3TR03|A0A4S3TR03_9EURY Isochorismate synthase OS=Natronolimnobius sp. XQ-INN 246 OX=2419781; GN = D8Y22_10345 PE=4 SV=1
MDRTSGEKGLAAGVPPSDGEASTDLVSYSRELEDVSLRAIVDDTARSRIQWAAPDGLEIAGRGTAVRFTATGADRFTALRTQADTTFDSLTHNGPRVARPRAFGGFAFHDTHDPTPPWSGFEAASFVVPRLSVTRSPDGDTWLTAVDTDPDAATDRLAEWAHTLAETPPMQPVGSRPGVASTRRPTSPAAWADGVTAALDRIDGGDLTKVVLAQSLSVRLAEPIEVPDTLERLRREYPNCYRFLLNQEGSGTFFGAPPEQLVSKRGDRVDTEALAGSVPRGETPEADDEHAERMLDDDKLRHEHDLVVDAIRTQLAPFADDLTVADRTIRRLATIQHLHTPIAATIDADSHVLELVEALHPTPAVGGVPPDIAWQTIRRTEPFDRGWYAAPIGWFDGDGDGEFAVGLRSGVATDETVTLFAGNGIVADSDPAEEWDEVQLKFRPVLDQLKR

SEQ ID NO: 94388 - protein, 445 aa, Natronomonas moolapensis
  REGION 1..445: note = tr|M1XKM9|M1XKM9_NATM8 Isochorismate synthase; OS = Natronomonas moolapensis (strain DSM 18674 / JCM 14361 / 8.8.11) OX=268739 GN=menF PE=4 SV=1
MEPLGSEKAAPRTRGLVSRATKLSTVPDRRAVLSVADSPRTFWSAPGEATVIGSGSATTIRADGPDRFRAIREAATELFSVGDVHAGALAARPRLFGGFAFHDEHTETAPWEGYPGAKFVLPRTQVTYAGEEAWLTVNGIGATPGAVERRLEEAADQFETLPDPGSVGTPPGIAGRTRTTSEAEWRESVVAATDRIAAGELRKVVLAQALRTSLERPLSMPATLTRLERRYPDCYRFLIEPDDGSGGFFGATPERLVGRSGRTVETGALAGTTGRGDTPEEDEWLAAELLADEKNVHEHELVADAVRSQLAPYAASVRTGERSIRRLATVQHIETPITAELTDDEHVLDLVEALHPTPAVGGLPPTEALRTIRDTEPFERGWYAAPVGWFDAAGYGSFAVAIRSALARGPTATLFAGVGIVEDSDPDREWDEVQLKYRPILDELE

SEQ ID NO: 94389 - protein, 445 aa, Natronomonas pharaonis
  REGION 1..445: note = tr|A0A1U7EWJ1|A0A1U7EWJ1_NATPD Isochorismate synthase OS=Natronomonas pharaonis (strain ATCC 35678 / DSM 2160 / CIP 103997 / NBRC 14720 / NCIMB 2260 / Gabara); OX = 348 780 GN=menF PE=4 SV=1
MEPLRSTELCPDETQLVSRSRRLSAPPDPRTALSMADAPRTLWAAPDEATVVGSGAAETIRADGNDRFRAVREAANELFATGDVHAGTLSARPRLFGGFAFHDEHDPAGPWRGFPGARFVLPETQLTYAEDGTWLTVHGVGRDVEAVESALEAAADRFDGATTPRPPAGPPGIERRERTTSKDRWRESVTAAIDRIEAGELRKVVLAQALQTALSRPVSLPDVLTRLADTYPDCYRFLIEPDDGGAGFFGATPERLVGRRGRTVETGALAGTTGRGDTPLEDEWLAEELRSDAKNVHEHELVADAIRDQLQPYAASVRTGERGVRRLATVQHLETPITAELAADEHVLSLVEALHPTPAVGGLPPDKALATIRDTEPFERGWYAAPVGWFDAAGNGSFAVAIRSAVAHGEAATLFAGVGIVADSDPDREWDEVQLKYRPILDELE

SEQ ID NO: 94390 - protein, 445 aa, Natronomonas sp.
  REGION 1..445: note = tr|A0A4U5JPJ8|A0A4U5JPJ8_9EURY Isochorismate synthase OS=Natronomonas sp. F20-122 OX=2217661; GN = DM868_03405 PE=4 SV=1
MEPLGSEETAPLDRELTSRTIRLTAAPDQRVALATAETPRTFWAAPGEATVVGSGSATTIRADGRDRFQAVQDAARELFSAGDVHAGALAARPRLFGGFSFHDEHASAGPWGGYPRAKFDLPRTQLTYTDDGTWLTVNAVDTDAERVERRLDAEVERLRSISSPDAGGGPPGIVDRTRTTSEANWRRSVTAATDRIAAGELRKVVLAQALRVTLARPLLLSDTLSRLGERYPDCYRFLIEPDDGAGGFFGATPERLVGRHGRTVETGALAGTTGRGETPEEDEWLAAELLADEKNVHEHELVADAVRTQLEPYAASIRAGERAIRRLATVQHIETPITAELADDVHVLELVEALHPTPAVGGLPPKEALRTIRDTEPFERGWYAAPVGWFDAAGYGSFAVAIRSAVARDDTATLFAGVGIVADSDPDREWDEVQLKYRPILDALE

SEQ ID NO: 94391 - protein, 449 aa, Natronorubrum bangense
  REGION 1..449: note = tr|A0A4D6HQB4|A0A4D6HQB4_9EURY Isochorismate synthase OS=Natronorubrum bangense OX=61858 GN=DV706_14975; PE = 4 SV=1
MDQSSGGRRLTADTESLPVDEPTDLVSRSRELEDVSFGAIVDAEQESRILWATPGGLEVVGRGVAVRMSARGPDRFDRIREQASRAFDALDHDGPHVARPRAFGGFSFHDEHEPGPPWTGFDAASFVVPQILVIRSEDGTWLTAVGTHPEAAIERLERWHDRLAALPAMQPSGTGPGVTSTQRTTSPADWTDQVEAALEQIEQGTITKVVLAQSLSVTLENSVHVPGTLERLRRQYPNCYRFLIANDTGGTFFGAPPERLVSKRDNRVETEALAGSVPRGETPEEDDAHAADMLDSEKVQREHGLVVEAIRNQLEPLASELTVDERTIRRLATIQHLQTPIAATLEGESHVLEIVEALHPTPAVGGVPPVAAWETIRDTETFDRGWYAAPVGWFDADGDGEFAVGLRSGVASDDTVTLFAGSGIVADSDPDDEWDEVQLKFRPILDELR

SEQ ID NO: 94392 - protein, 463 aa, unidentified; identical to SEQ ID NO: 93435
  source 1..463: note = Negativibacillus sp.
  REGION 1..463: note = tr|A0A3A8XN52|A0A3A8XN52_9FIRM Isochorismate synthase MenF OS=Negativibacillus sp. 1xD8-3 OX=2320085; GN = menF PE=3 SV=1

SEQ ID NO: 94393 - protein, 320 aa, Neisseria meningitidis
  REGION 1..320: note = tr|C6SIW0|C6SIW0_NEIME Putative chorismate binding enzyme OS=Neisseria meningitidis alpha275 OX=295996; GN = ybbE PE=4 SV=1
MPSEPLFGRHLIFASLTCLIDAVCKKKIPITQNVYILSILRMTRSKPVNRTAFCCLSLTAALILTACSSGGGGVAADIGAGLADALTAPLDHKDKSLQSLTLDQSVRKNEKLKLAAQGAEKTYGNGDSLNTGKLKNDKVSRFDFIRQIEVDGQLITLESGEFQIYKQDHSAVVALQIEKINNPDKIDSLINQRSFLVSGLGGEHTAFNQLPDGKAEYHGKAFSSDDAGGKLTYTIDFAAKQGHGKIEHLKTPEQNVELAAAELKADEKSHAVILGDTRYGSEEKGTYHLALFGDRAQEIAGSATVKIGEKVHEIGIAGKQ

SEQ ID NO: 94394 - protein, 367 aa, Neochlamydia sp.
  REGION 1..367: note = tr|A0A0C1K3I2|A0A0C1K3I2_9BACT Salicylate biosynthesis isochorismate synthase OS=Neochlamydia sp. EPS4 OX=1478175 GN=pchA PE=4 SV=1
MKCKRKFDGGNMRLARQDWRCFIESGSLIRLNKDNYLIGWGARTWLENIYESPSPFFYFPDFFLSSPCPWFQHEYTAIVSHHEFLAAMHTYPATPLPLSWKNPYLAHFENTCKELHTHFYNKKLKKAVPYIFEESLSTMTLDRLGSTLKHLINYVKDQQLHVYGYWEETEGILGASPEILFNYHNASEGLIETVACAGTKRYRDSDSIFIQDSKELYEHQLVIEGIQESLSSLGVVTIGELQILQLPKISHLMTPIQLKMKGPSNFLALVKALHPTPALGAFPKEEGRKWLHLYNDKIDRWRYGAPVGCLFDNKRQARCIVGIRNVQWNSQGAKIGAGCGIVPASQWHHEWQEINLKLLSIKEMIAL

SEQ ID NO: 94395 - protein, 423 aa, Nicoletella semolina
  REGION 1..423: note = tr|A0A4R2N5I8|A0A4R2N5I8_9PAST Isochorismate synthase MenF OS=Nicoletella semolina OX=271160 GN=menF; PE = 3 SV=1
MHFFTELKQQLSQKLAALQPKQGLCQIQVENNLDLDDLQLVSWLKGQDCFPHFFWKSRDQALTFVSVGAVRQLASLAEVEYFQQHYPFKLFGGLRFEGSCYFVLPRFYFEKNAEKLTAYLTLDTDCLAEFTVCEQFLIQLEWLELPAFRASTPIYRALDCDFLRWQEMIDRALAAIDAGHFEKVVLANATKLQFERPLCAYSLSVLSQQNNHGSYHFLWAKNAQHIFIGASPERLYQRIGRQLYTEALAGTVAVTENAEQTEQNAQWLLNDGKNIYENQLVVEDISNQLINCIQEISVQATEIKRLKKVQHLQRKIQASLKPFVSDVDCLNRIHPTAAVSGLPRDKAKQFIRDNEQTARGWYAGALGYLAPQFAEFCVTLRSALVENANITLYAGAGIVAGSEASTEWQEIERKFLTIASLLV

SEQ ID NO: 94396 - protein, 152 aa, Nicotiana tabacum
  REGION 1..152: note = tr|Q6I692|Q6I692_TOBAC Isochorismate synthase (Fragment) OS=Nicotiana tabacum OX=4097 GN=ics PE=2 SV=1
  VARIANT 126: note = Xaa can be any naturally occurring amino acid
AYQFCLQPPQSAAFIGNTPEQLFHRDSLSICSEALAGTRARGGSELLDLKIGQDLLSSAKDHNEFAIVRECIRRKLEAVCSSVLIEPKKAIRKFPRVQHLYARLRGRLQTEDEEFKILSSIHPTPXVCGYPTEDARAFISETEMFDRRMYAG

SEQ ID NO: 94397 - protein, 456 aa, unidentified
  source 1..456: note = Nissabacter sp.
  REGION 1..456: note = tr|A0A4P8SGR7|A0A4P8SGR7_9GAMM Isochorismate synthase MenF OS=Nissabacter sp. SGAir0207 OX=2126321; GN = menF PE=3 SV=1
MVIEVTVSILPGVFQQLDAALAQALLDPAWPSASGVRQLSLTFMADDDEPLLDWLAAQPHYPKFYWQPREGTERVAICGQVAQFGTLRQASDYVRQHSDTAGRLRVWGVNAFDAAPVEGTPQAACLFVPRLTLHQQAHTLTLTLTLADPYALHGDLARAAAFLQQLQPAAVLPPLHTTLVHASHQPDEEGWQEMVEQALQQIDAGELEKVVLARQTVLTFNQPVEPGQMLAASLAVNHHCYHFMMAFSPEEAFLSASPERLFLRQGDQLTTEALAGTVANSEEADQAQALAAWLMGSEKNQRENWLVVDDICQRLQGGAQALDVMPPEIVRLRKVQHLRRRIHGRLRQAEDGDCLARLQPTAAVAGLPRQPARSFILCHEPFPRHWYAGSAGYLSRDQSEFAVSLRSALIRANQVHLYAGAGIVAGSDPAGEWQEVENKAAGLRSLLHPDDGQSPL

SEQ ID NO: 94398 - protein, 458 aa, Nitrococcus mobilis
  REGION 1..458: note = tr|A4BLT3|A4BLT3_9GAMM Salicylate biosynthesis isochorismate synthase OS=Nitrococcus mobilis Nb-231; OX = 314278 GN=NB231_15663 PE=4 SV=1
MNILTRMWDFESVFTAARAQARQACQPVLAVLTFLWTGRDPLELYEQLESSSVPCLYWETRDPELTLLGIGRTLELCPDPGSGFERVEQRWREMTVAALVEGSAAPRAIGGFRFDAEAVPEWPWRQFPSARLIVPRLLLERTPQGSLLVCQKLIGVDDDPIAEGHRYRRDIEALLGQGASSRRQAKPSLVQNQGVSAGQWQSKAEALIEAIRKGRLQKVVLARHLHQTYSEPLSPAAILRRLRRSDARSHLFAVRHGDLCFLGATPERLVSVREGRVRTHALAGTIQRGDDPETDQRLGQQLLSSAKDRHEHALVVRAIRDALAPLVEGLTVSPKPVLHRLPVMQHLSTTIEARIAGVNGILKLVEVLQPTPAVAGHPKGEALSCIRLHEGFDRGWYAGPLGWIDGNGNGDFVVALRSALIKGRDCHLFAGCGLVADSVPEYEYQETCLKLSSMQEAV

SEQ ID NO: 94399 - protein, 260 aa, unidentified
  source 1..260: note = Nitrolancea hollandica
  REGION 1..260: note = tr|I4EJL3|I4EJL3_9CHLR Menaquinone-specific isochorismate synthase OS=Nitrolancea hollandica Lb; OX = 1129897 GN=NITHO_4100004 PE=4 SV=1
MADGVDAVRGGALEKVVLARQVSIRSDLPFDVVNALQRLRASYPTCYVFAVARGDQVFLGATPERLARLRDRAVQVACLAGSRERGMTPEEDRRLGDALLDSTKDRSEHAVVLRALREALAPVCSEVSAPDEPALLSVRNVHHLYTPVTGRLANGACMLDIVARLHPTPAVGGFPSRDALRFIREREDLDRGWYAAPVGWVDHHGEGEFAVALRSALIAGSEAALFAGCGIMAGSDPEQEYAESWLKLRPVLSALGGREP

SEQ ID NO: 94400 - protein, 366 aa, Nocardia africana
  REGION 1..366: note = tr|A0A378WK00|A0A378WK00_9NOCA Isochorismate synthase dhbC OS=Nocardia africana OX=134964 GN=dhbC PE=4; SV = 1
MDGFLLAQPGGVVRTTGIRRAFDDARRAATALRDGAAELIVGAIPFDPGDAAALCEPQQAQHSAGPWRPAAVPPLPEVRVVAEIPSPAEHVARVTKLVEQLSDPGQPLRKVVAARSLIAEAEQPLEPEVVAAHLLVRHPQANVFAVDLTPAGRTGAHLVGATPEVLVARHGDTVTLRPLAGTLPRHPDPALDAERSRELLSSTKNRDEHAFVIEWIREQLGPVCAELAIPDGPELINTTEVWHLATPITGRLRDPATSALDLALLLHPTPAVCGTPTALALRTITEYEEPRGFYGGAVGWCDARGDGEWVVAIRCAELSADGRTAQAYGGGGIVAASDPRTELDETTAKLRTLLNGLACPVPDQPS

SEQ ID NO: 94401 - protein, 368 aa, Nocardia brasiliensis
  REGION 1..368: note = tr|A0A379BHB5|A0A379BHB5_9NOCA Isochorismate synthase dhbC OS=Nocardia brasiliensis OX=37326 GN=dhbC_2; PE = 4 SV=1
MGGVERAATCVLTGPEGSLVGTGVRHSYTDLDTAAKALRNDDASILLGALPFDPAAPAALIDPIAFRRAPDRWRHGRNAEPWRPRLRSIEPDPSAAEHQRRIESALDAIAAGLLDKVVLARRMRLTTERAINGVAMLRALVGRDPRANGFYLDLAAFRGPGAALVGASPELLIRRTGSQVYACPLAGSAPRRGAVEADRTAARLLASEKDRREHRFVVDFIVSALAPLCSTLRWSEKPEIFGTPDLVHLGTPIRGTLADPGCTSLDLARVLQPTPALGGTPRGEAMRLIEEIEGDRGFYGGAVGWCDRSGDGAWSVCIRCAEIAPGGHVATAFAGGGIVAGSEPAAEVEETMAKFRAILSVFDDEPAA

SEQ ID NO: 94402 - protein, 366 aa, Nocardia cerradoensis
  REGION 1..366: note = tr|A0A231HBI4|A0A231HBI4_9NOCA Putative isochorismate synthase MenF OS=Nocardia cerradoensis; OX = 85688 GN=menF PE=4 SV=1
MDGFLLAQPGGVVRTTGIRRAFDDARRAAAALRAGAAELIVGAIPFDPADAAALCEPEQAQHSAGPWRPAAVPPLPEVRVVAEIPSPAEHVARVTKLVEQLSDPAQPLRKVVAARSLIAEARQPLEPEVIAAHLLVRHPQANVFAVDLTPAGRSGAHLVGATPEVLVARHGDTVTLRPLAGTLPRHADPAVDAERSRELLSDTKNRDEHAFVIEWIREQLTPVCAELAIPEGPELINTAEVWHLATPITGRLRDPATTALDLALLLHPTPAVCGTPTDLALRTITEYEEPRGFYGGAVGWCDARGDGEWVVAIRCADVSADGRTVQAYGGGGIVAASDPRTELDETTAKLRTLLNGLACAVPDQPS

SEQ ID NO: 94403 - protein, 364 aa, Nocardia cyriacigeorgica
  REGION 1..364: note = tr|A0A4U8W5M6|A0A4U8W5M6_9NOCA Isochorismate synthase dhbC OS=Nocardia cyriacigeorgica OX=135487; GN = dhbC PE=4 SV=1
MDGFLLAAPDGVVRAHDTRATFDDAQQAVTALRDGTAPMVVGALPFDPREPAALSVPGRVEHTAGPWRPAAVPELPPVSVISELPSTGEHLARVAKLVEQLADSRQPLRKVVAARSVLAAAEEPLDAEVVAAQLLTRHPRAHVYAVDLTPAGRAGETLVGATPEVLVSRHGRTVTLHPLAGTLPRLADPDADAVQARELLASTKNRDEHAFVIDWIADKLRPLCTSLSIPDGPELVQTQQVWHLGTPITGTLRDPAPTALELALLLHPTPAVCGTPTPQALEAIIELEGDRGFYGGAAGWCDGNGDGDWVVAIRCAEIAADGLSLRAFAGGGIVAASEPRIELDETTAKLRTLLDSLNCALPPN

SEQ ID NO: 94404 - protein, 364 aa, Nocardia farcinica
  REGION 1..364: note = tr|A0A0H5P1I9|A0A0H5P1I9_NOCFR Isochorismate synthase dhbC OS=Nocardia farcinica OX=37329 GN=dhbC PE=4; SV = 1
MNGFLLARPDGVLRASGVRAAFDAVNDARAALRTGAAAIVVGALPFDPARPAALVAPAEQVHTAGPWRPAALPPLQRVQVVSEFPSAGEHLARVAKLVEQLDDPDTELRKVVAARSVLAEADGVLEPETVAAQLAARHPGASVFAVDLTAAGRTGATLIGASPELLVARQGRTVTLHPLAGTAPRRADPDADAAQAAELLDSAKNREEHSYVIEWIRDVLTPLCTELRIPEGPRLVETHDVWHLATPIVGTLREPAPTALDLAVLLHPTPAVCGTPTAAALETITRVEGDRGFYGGAVGWCDADGDGTWVVAIRCAELAADGRSLRAYAGGGIVAASQPQAELDETTAKLRTFLGGLDCAVPTH

SEQ ID NO: 94405 - protein, 362 aa, Nocardia otitidiscaviarum
  REGION 1..362: note = tr|A0A516NYG7|A0A516NYG7_9NOCA Isochorismate synthase OS=Nocardia otitidiscaviarum OX=1823; GN = FOH10_32830 PE=4 SV=1
MDGFLLATPGAVLRTAGVRAALDTAEDAAAALRDGAELVVGALAFDPRRPAALAVPERSAYTAGPWRPGALPELPPVRVVTEIPSAAEHVARVTKLVEQLADPGQPLRKVVAARSLIAAAESPLEPEVIAAHLITRHPNANVFAVDLGPAGRDGETLIGATPEVLVARHGRTVTLRPLAGTLPRRPDPADDAAQARELLASTKNRDEHAFVIEWIRERLTPVCAELTVPDGPEIIGTAEVWHLATPITGQLRDADVTALDLAVLLHPTPAVCGTPTDLALDAITELEEDRGFYGGAVGWCDAHGDGEWVVAIRCAELSADGRALRAFGGGGIVAASDPRAELDETSAKLRTFLGGLRCALPT

SEQ ID NO: 94406 - protein, 366 aa, Nocardia seriolae
  REGION 1..366: note = tr|A0A0B8NHC0|A0A0B8NHC0_9NOCA Isochorismate synthase OS=Nocardia seriolae OX=37332 GN=D6158_34515 PE=4; SV = 1
MREPVRFRLSGASGPVGLDGPLICYHSLAEAEAAVRAGNYGNLVAGSIPFDDGAANPSLYLGWRGAHQPEAAPDAKAATHFRADIDFNDGSIADYLRLLDDALALLRSPEATLEKIVIARSERYFYDGVVDPIRLFERIASLYPNARNYFVEHLDHPGVYTMGASPELFLRKTGPAVVMTPLAGTVPRDTRLPESADRGRAHDLLFDDKYLAEHRHLVDFMVKGLAPFCSDLDHAAQPELVAAPGLWHLGTPITARLLDPETPVADLVAALHPSPAVCGVPQEEARRMIARYESAREYYGGLIGWLDGAGDCEFHMALRGLELDTHRGNLTLRAGGGIVARSRIDIEFAETSAKLATMRRVLGLPR

SEQ ID NO: 94407 - protein, 363 aa, Nocardia sp.
  REGION 1..363: note = tr|A0A386ZHC3|A0A386ZHC3_9NOCA Isochorismate synthase OS=Nocardia sp. CFHS0054 OX=2382165; GN = D7D52_21490 PE=4 SV=1
MDGFLLATPDGVVRTSGARAGFDTAAAAAAALRSGAAELIVGALPFDPRRPAALVAPERAAHTAGPWRPAALPELPEVRVVSEIPSAAEHVARVTKLVAQLGDPAQPLRKVVAARSLLATAAAPLEAEVIAGQLVTRHPRAAVYAVDLSPAGRPGEALIGATPEMLISRHGRAVALHPLAGTLPRLADPDADAAQARDLLASSKNREEHAYVIDWIRERLAPVCVELSIPDGPELLSTPEVWHLATPIRGRLRDPATTALDLAVLLHPTPAVCGTPTDLALDAIADLEGDRGFYGGAVGWCDAAGDGDWYVAIRCAELSADARTLRAFGGGGIVAASDPDTELDETTAKLRTFLGGLRCAIPH

SEQ ID NO: 94408 - protein, 376 aa, unidentified
  source 1..376: note = Nocardioides albidus
  REGION 1..376: note = tr|A0A5C4WD86|A0A5C4WD86_9ACTN Isochorismate synthase OS=Nocardioides albidus OX=1517589 GN=FHP29_03630; PE = 4 SV=1
MAREPITPAALAARPMLFASGEEAYVARSVRRTWEVADGADHGWADAVVADLEPGERALCALSFAAGAPGIAHFATGSEHALQRPDTEATVERTYEVTEFPTADEYAVMVATALERIASGDIHKVVLGRCLDVVSSPPLVPAEIIDRLLTTRPGRYVFSVPLDASPHGDGPNLVGASPELLVRREGAVISCTPLAGSAPRSDDEAEDLRRAASLQESAKDLAEHAFVVEAIVHALKDVCVEIEYPATPELLSTDTVWHLATPIHARLADPVDGPSALRLAQLLHPTPAVGGVPTAAANAVIADLEGDLRDWFAGCVGWVDRHGDGEFAVTIRAAVMDGPRLRLFAGAGIVAGSDPAAEVRETGAKLATMARVTGLP

SEQ ID NO: 94409 - protein, 381 aa, unidentified
  source 1..381: note = Nocardioides bacterium
  REGION 1..381: note = tr|A0A4S4ZUU4|A0A4S4ZUU4_9ACTN Isochorismate synthase OS=Nocardioides bacterium OX=1565122; GN = E7Z54_19730 PE=4 SV=1
MAREPITPAALAARPLLFASGEEAYVASRVLRTWETPDGADRAWADAIVAALAPGERALAALSFAPGAPGLAHQVIGSEHALRRPAGSRAGAERTYQVTEFPAAEEYAGMVEAALAKIEDGTLRKVVLGRCLDVVSDPPLAPAEIIDRLLVTRPGRYVFSIPLIGADAEDGPDGGPVLLGASPELLVRREGTLITCTPLAGSVPRSEDPAEDDRRARALLDSAKDLAEHAFVVDAIVHALKEVCVEVEHPAAPELLSTDTVWHLASPIRARLAAGEEGLSALHLAQLLHPTPAVGGVPTAAANQVIADLEGDLRDYFAGCVGWVDGEGNGEFAVTIRAAVIDGNRLRLFAGAGIVAGSDPASEVRETGAKLATMSRVTGLP

SEQ ID NO: 94410 - protein, 436 aa, Nocardioides caeni
  REGION 1..436: note = tr|A0A4S8N6W1|A0A4S8N6W1_9ACTN Isochorismate synthase OS=Nocardioides caeni OX=574700 GN=E9934_11820; PE = 4 SV=1
MDRRDLRRQLGRPLRAHLRPHRHRRLGAHRRGRRSRAARGARRPLRRRVSVGDDPTPITPAALAERPLLFASGELAYVADGVRRTWSTPDGADPGWAEEVRAVLAPGERALVALSFAAGAPGLAHVVTGAERTLRRHPVEAVERRYEVTEFPTPEQYAGMVEAALDKIAAGDLHKVVLGRCLDVVSTPSLVPAEIIDRLLTTRPGRYVFSVPLVAGTADGATPLDGPILVGASPELLVRRSGREISCTPLAGSVPRSDDPTEDARRADGLRDSAKDLAEHAFVVEAIVRALEDVCVEIEHPATPELMSTDTVWHLATPIRARLADGTEGPSALRLAQLLHPTPAVGGVPTAAANAVIADLEGDLRDWFAGCVGWVDAVGDGEFAITIRAAVLDGERLRLFAGAGIVAGSDPAAEVRETGAKLTTMARVTGFTPPGG

SEQ ID NO: 94411 - protein, 464 aa, Nocardioides daphniae
  REGION 1..464: note = tr|A0A4P7UG37|A0A4P7UG37_9ACTN Isochorismate synthase OS=Nocardioides daphniae OX=402297 GN=E2C04_15495; PE = 4 SV=1
MRQHPRPRGHQLALRPGPGRRPGRGAPVLSRPERARRAGVRCCLVTTHPTPPATPSLVVVTEAVEVAAVEALLDHLPRTEPVTWLRNGEGMVGWGVAARVRTSGSTRFRDADKWWSELCDQAQVRDEVDEPGTGLVAFGSFAFADHPGDSVLTVPSVLLGRRGSVAWRTTVHVAGAPTPADVEVEPVVAPTGVLFSDGALDGETWMGVVADAVDRINAGDLEKVVLARDLIATADAEVDVRAPVAHLATHYPTCWTFHVDGMFGATPEMLVRRERGLVTSRVLAGTIRRTGDDERDLALAATLARSSKDLEEHEYAVRSVADALEPHCSSMNVPESPFVLHLPNVMHLATDVNGVVHDAATVSSLRLAESLHPSAAVGGTPTPVAVALIAEIEGMDRGRYAGPVGWIDADGDGEWGIALRSASVEGAQVRLFAGCGIVGDSAPEAELAESQAKFVPVRDAVTGA

SEQ ID NO: 94412 - protein, 428 aa, Nocardioides dokdonensis
  REGION 1..428: note = tr|A0A1A9GG76|A0A1A9GG76_9ACTN Isochorismate synthase DhbC OS=Nocardioides dokdonensis FR1436; OX = 1300347 GN=dhbC PE=4 SV=1
MTSSASPGEQSLVDAPLVARTVAVDVARLDALGSLLDLLPAEHPVSWLRRGEGLVGWGRAAWVRTTGTTRFSDATKWWDETTARAVVRDEIEEPGTGLVCFGTFAFADEPGDSVLQVPSVVVGRRGDRAWLTVVGRGTLEPLGDHLSPAEPPAAPVDVTFADGSLNSEQWMSAVADAVRRIGGGDLEKVVLARDLIASTVEDVDVRWPLQRLAAAYPMCWTFHVDGMFGATPEMLVRRERGLVTSRVLAGTIRRTGDDERDLALAATLARSSKDLEEHEYAVRSVADALEPHCSSMNVPETPFVLHLPNVMHLASDVAGVVHDAQTVSSLDLAESLHPSAAVGGTPAHEATALITEIERMDRGRYAGPVGWMDASGDGEWGIALRSGAVEGRTVRLFAGCGIVADSDPEAELAEAQAKFVPVRDSLSD

SEQ ID NO: 94413 - protein, 417 aa, Nocardioides ganghwensis
  REGION 1..417: note = tr|A0A4Q2SBZ1|A0A4Q2SBZ1_9ACTN Isochorismate synthase OS=Nocardioides ganghwensis OX=252230; GN = EUA07_15775 PE=4 SV=1
MTTPASAPSPGPAAPLVVRTVPVDLADLPLLDLLPREQPVSWLRRGEGLVGWGVAARLETSGPTRFSDAVKWWSETVARADVEDHVGEPGTGPVCFGTFAFADEPGDSVLVIPQVVVGRRGDRTWLTTVSVDAPTLAPTPAPAAPVGLVFSDGARNGEEWMSVVAEAVRRIGAGDLEKVVLARDLIATTDEPLDVRWPLRRLASQYEMCWTFHVDGLFGATPEMLVRRERGLVTSRVLAGTIRRTGDDERDLALAATLARSSKDLEEHEYAVRSVADALEPHCSSMNVPEAPFVLHLPNVMHLATDVNGVVHDVATSLQLAESLHPSAAVGGTPTPEATRLIAEIEGMPRDRYAGPVGWMDASGDGEWGIALRSAMVTDRGVRLFAGCGIVASSDPEAELAESQAKFVPVRDALEAD

SEQ ID NO: 94414 - protein, 417 aa, unidentified
  source 1..417: note = Nocardioides glacieisoli
  REGION 1..417: note = tr|A0A4Q2RRF9|A0A4Q2RRF9_9ACTN Isochorismate synthase OS=Nocardioides glacieisoli OX=1168730; GN = EUA06_13230 PE=4 SV=1
MTTPASGSQPGLAAPLVVRTVPVDLADVPLLDLLPEQDHVSWLRRGEGLVGWGVAARLETSGPARFSDAVKWWSETIARADVDDAVGEPGSGPVCFGAFAFADEPGDSVLVIPEVVVGRRGDRTWLTTVSVEAPDLAPAPAPRPPVGLTFSDGARNGEEWMTVVADAVSRIASGELEKVVLARDLIATTDEPLDVRWPLHRLAESYEMCWTFHVDGLFGATPEMLVRRERGLVTSRVLAGTIRRTGDDERDLALAATLARSSKDLEEHEYAVRSVADALEPHCSSMNVPEAPFVLHLPNVMHLATDVNGVVHDLASSLQLAESLHPSAAVGGTPTSAATALIHDIEGMPRDRYAGPVGWMDASGDGEWGIALRSAQVTDSGARLFAGCGIVASSDPEAELAESQAKFVPVRDALEGA

SEQ ID NO: 94415 - protein, 366 aa, unidentified
  source 1..366: note = Nocardioides immobilis
  REGION 1..366: note = tr|A0A417Y3D8|A0A417Y3D8_9ACTN Isochorismate synthase OS=Nocardioides immobilis OX=2049295; GN = D0Z08_10495 PE=4 SV=1
MALPARPLLFASGEEAYVADRVLRTWITPDGADPGWADQVVAALEPGERAIGALSFAAGAPGILHQVVGSERPLHRPASPPRARTYDVHEFPTPAAYADMVRAVLDKIAAGVVRKVVIGRCLDVISDPPLEPAEIIDRLLVTRPGRYVFSVPLTEGLEDGPLLVGASPELLVSREGDRIACTPLAGSVPRSPGPDEDARRADALRASAKDLAEHAFVVDAIVHALKEVCVDVEPPTGPTLLATDTVWHLASPITARLEDPDSGPSALRLAQMLHPTPAVGGVPAKAAAEAIADLEGDLRDYFAGCVGWVDESGDGVFAITIRAAVIDGARMRLFAGAGIVAGSDPDSEVRETGAKLETMTRVAGLG

SEQ ID NO: 94416 - protein, 422 aa, Nocardioides iriomotensis
  REGION 1..422: note = tr|A0A4Q5J821|A0A4Q5J821_9ACTN Isochorismate synthase OS=Nocardioides iriomotensis OX=715784; GN = ETU37_02590 PE=4 SV=1
MTQPQVSADPLVVRTVPLDDPGDLLALLPGSATTPDVTAWVRNGDGLVGWGAAAVLRPAGADRFAQARAWWVDQVGTAVVRDEVRLPGTGLVCFGSFAFADETGDSVLVVPEVVVGRRGGRAWVTTTSAGALTTTPEVAPVEPPAPPSNVTFSDGAMSGAGWESVVAEAVRRINAGDLEKVVLARDLVATASEDVDVRWPLHRLSESYPMCWTFHVDGLFGATPEMLVRRERGLVTSRVLAGTIRRTGDDERDLALAATLARSSKDLEEHEYAVRSVADALAPHCTSMNVPEAPFVLHLPNVMHLATDVAGVTHETDDVASSLTLAEALHPSAAVGGTPTSVARELISEIEGMDRGRYAGPVGWMDAAGDGEWGIALRSAEIDGARVRLFAGCGIVADSDPAAELAEAQAKFVPVRDALAGR

SEQ ID NO: 94417 - protein, 419 aa, Nocardioides oleivorans
  REGION 1..419: note = tr|A0A4Q2RZV3|A0A4Q2RZV3_9ACTN Isochorismate synthase OS=Nocardioides oleivorans OX=273676; GN = EUA93_03790 PE=4 SV=1
MTPPSSAPQAGQAAPLVVRTIPVDQADLPLLDLLPQQDPVSWLRRGEGLVGWGVAARLETSGPTRFSDAVKWWSETVARADVEDHVGEPGTGLVCFGAFAFADEPGDSVLVIPQVVVGRRGDRTWLTTVSVDAPDLAPTDRPSPPVGLVFSDGARNGEEWMSVVADAVDRIAAGDLEKVVLARDLIATTDEPLDVRWPLRRLAESYEMCWTFHVDGLFGATPEMLVRRERGLVTSRVLAGTIRRTGDDERDLALAATLARSSKDLEEHEYAVRSVADALEPHCSSMSVPEAPFVLHLPNVMHLATDVNGVVHDLATSLQLAESLHPSAAVGGTPTPVATRLISEIEGMARDRYAGPVGWMDGDGDGEWGIALRSAMVTEDGVRLFAGCGIVASSDPEAELAESQAKFVPVRDALGADTP

SEQ ID NO: 94418 - protein, 380 aa, Nocardioides simplex
  REGION 1..380: note = tr|A0A0C5XCX7|A0A0C5XCX7_NOCSI Isochorismate synthase DhbC OS=Nocardioides simplex OX=2045 GN=dhbC PE=4; SV = 1
MARDPITPAALATRPMLFASGEEAYVASAVRRTVETPDGADPAWADGVVAALEPGERALCALSFAAGAPALAHLVVGSEHALQRPPHDASVQRTYEVTEFPTADAYAGMVEAALAKIATGALHKVVLGRCLDVVSTPPLVPAEIIDRLLTTRPGRYVFSVPLVPGTDAGPPSDGPILVGASPELLVRREGLSISCTPLAGSVPRSADPDEDARRAEGLRQSAKDLAEHAFVVEAIVHALKEVCVEIEYPATPELLSTDTVWHLATPIRARLADGVDGPSALRLAQLLHPTPAVGGVPTAAANAVIADLEGDLRDWFAGCVGWVDGRGDGEFAVTIRAAVMDGPRLRLFAGAGIVAGSEPASEVRETGAKLATMARVTGLP

SEQ ID NO: 94419 - protein, 417 aa, Nocardioides sp.
  REGION 1..417: note = tr|A0A4Z1CIQ6|A0A4Z1CIQ6_9ACTN Isochorismate synthase OS=Nocardioides sp. MMS17-SY213 OX=2518372; GN = EXE59_00950 PE=4 SV=1
MTTPASAPSTGPAAPLVVRTVPVDLADLPLLDLLPREQPVSWLRRGEGLVGWGVAARLETSGPTRFSDAVKWWSETVARAGVEDHVGEPGTGPVCFGTFAFADEPGDSVLVIPEVVVGRRGDRTWLTTVSVDAPTLAPTPDPAAPVGLVFSDGARNGEEWMSVVAEAVRRIGAGDLEKVVLARDLIATTDEPLDVRWPLHRLASQYEMCWTFHVDGLFGATPEMLVRRERGLVTSRVLAGTIRRTGDDERDLALAATLARSSKDLEEHEYAVRSVADALEPHCSSMNVPEAPFVLHLPNVMHLATDVNGVVHDVATSLQLAESLHPSAAVGGTPTPEATRLIAEIEGMPRDRYAGPVGWMDASGDGEWGIALRSAMVTDGGVRLFAGCGIVASSDPEAELAESQAKFVPVRDALEAG

SEQ ID NO: 94420 - protein, 419 aa, unidentified
  source 1..419: note = Nocardiopsaceae bacterium
  REGION 1..419: note = tr|A0A3N0E264|A0A3N0E264_9ACTN Isochorismate synthase OS=Nocardiopsaceae bacterium YIM 96095 OX=2487137; GN = EFW17_21000 PE=4 SV=1
MTVASEAPRLIVRTVALRDHHELLGHLPETAPLAWLHNGDGLVGWGEAARLDLPAENEPNGQRFDTAARWMSELAAAADVEDAVGLPGTGPVAFGGFTFDPRSPGSTLVVPRVVVGSRAGRVWLTTICDHPGSHPDALLSSVTSTRYIGPLTWSDGSLSAQGWGGAVAAAVRRIRAAELHKVVLARDIHAEAGGTIDVRTLLSRLARAYPNCYTFCVDGLVGATPELLLRRAGGDVTSLVLAGTRPRGSTSEEDERIAGDLLASAKETEEHRYAVESLRTALTPLTSSVRLPDHPELLRLSNVQHLASPASATLREGVSTFDVIAAMHPTAAVGGTPARVAMDVIRELEGMDRGRYAGPVGWLDTRGDGEWGIALRCAHVEGSRARLFAGCGIVAGSDPEAEIAEADSKFRAMRSALAD

SEQ ID NO: 94421 - protein, 427 aa, Nocardiopsis alba
  REGION 1..427: note = tr|J7KXY9|J7KXY9_NOCAA Isochorismate synthase family protein OS=Nocardiopsis alba (strain ATCC BAA-2165 / BE74); OX = 1205910 GN=B005_5227 PE=4 SV=1
MNAALTPPKLFVRTVPLRDRADGLVRRLPEGAPLAWLTGDEGIVGWGEAARFDPEPSPEGTPPTDITRFTTAARRFTELLEHAEVEDEVGLPGTGPVAFGTFAFAPTSGGSALIVPRVIVGRREGRSWLTTITDAPGDHPRELLWPVTEPRPVGPVDWRPGSLTDTAWMDTVASTVARIRSGELDKAVLARDAHAEAHSPIDVRVLLERLRTRFPGCFTFSVAGMVGATPELLLRLEGDEFTSLVLAGTRPRGVDEEDDHRLGREMMSSAKDVEEHGLAVDSLRAAMEPLTEELTVPAWPHLLKLANVQHLATRAHARMSPGVGALEAVAALHPTAAVGGTPTETAMRLIAEVEGMDRGGYAGPVGWVDGAGNAEWGIALRGAHVEGSRARLYAGCGIVAGSDPASELAETESKFRVMREALTDPET

SEQ ID NO: 94422 - protein, 387 aa, Nocardiopsis sp.
  REGION 1..387: note = tr|A0A1R3UKQ9|A0A1R3UKQ9_9ACTN Isochorismate synthase of siderophore biosynthesis OS=Nocardiopsis sp. JB363 OX=1434837 GN=BQ8420_03485 PE=4 SV=1
MPDQRTAAPAASAGELLSAYRPGDAFFSTATGVLHGTGALHTLDRLDDLSAALADAGPDAVAMGALPFDTSGPAHLVVPETVRRAPSPTEGPAPENRWRPLGEGWRLTPVPEPEAHVAAVERAVKLMAEDADLRKVVLARSLRVEGDEPIDVATVLANLLWRDPTAFVFATDLPERGSGTRTLIGASPELLVAKRGRDVLSNPLAGSAPRSADPTKDQRNAVDLLTSAKDRHEHAVVVDAVTESLRPFCRTLSVPTEPELVKTATMWHLSTRVNGELTDPDVPVHTLAAALHPTPAICGTPTGRAFDTITDLEPFDRGFYTGAVGHSDAHGDGAWVVTIRCADVAGSTVDLFAGGGVMPESDPEAELAETSAKLRTLLLALGVNGTV

SEQ ID NO: 94423 - protein, 471 aa, Nodularia spumigena
  REGION 1..471: note = tr|W6FWZ3|W6FWZ3_NODSP Isochorismate synthase Menaquinone-specific isochorismate synthase OS=Nodularia spumigena CCY9414 OX=313624 GN=NSP_48180 PE=4 SV=1
MTVLPCRSNFFVKNKDLYHFLLNVQENCRNHNCRQIVSISLDIDWVDPLVVLDKLTQANDINFYFENQAQGEAIAAIDSVTKLEIDGKDRFHQAEYFIKSCLKNIINFGNNQPTFAEPHFFCYFSFFDYNSQIDYPFPSATVFLPRWQISVKNKRCILVNNIIIKASTNVENILQNLQDKIVQIQSLEYTSANLEQLPTKFSKQSVTNAQDFKRAVGSAVEKIRSSHLSKIVLANALDVKSNHNFNLFKSLNNLRQIHPNCYIFSTSNGKGQNFIGASPERLISINNQELISDALAGSAPRGKTPAEDAANANRLLNSIKERHEHSLVIDFITQRLTQLGLLPQVLAPRLRQLSNIQHLWTPITATVPANVHPLKIVSQLHPTPAVAGATRDFACAEIRRYESFERGLYAAPLGWVDARGNCEFIVGIRSALIDGDRARLYAGAGIVAGSDPEKEFAEVQLKLQALLKALV

SEQ ID NO: 94424 - protein, 300 aa, unidentified
  source 1..300: note = Nonlabens dokdonensis
  REGION 1..300: note = tr|L7WEY7|L7WEY7_NONDD Isochorismate synthase; OS = Nonlabens dokdonensis (strain DSM 17205 / KCTC 12402 / DSW-6) OX=592029 GN=DDD_3389 PE=4 SV=1
MTYGVFSKFENSEDQVFIPSEEYKEFKFKNSSNTSSKLLNATHLIDEKEKLRYANMVRKTVDMLKESTVQKVVLSRVESFTKRSSDLEILEALLNEYPAANCYFFHHPKVGKWMGATPEILAVIKGENLQTMSLAGTAVFNPNQDHVWGEKEIEEQKLVTDFIVENLKAKGVSHIKKSLVQTAQAGTLVHLKTDINALIDPSRKEDYIEALHPTPAVCGLPRDAAQKFIKDNEGYDRSFYTGYLGIVEEREASYYVNLRCMQLLDDEAYLYVGGGITAKSDPILEYEETVQKLFTMKSLL

SEQ ID NO: 94425 - protein, 345 aa, unidentified
  source 1..345: note = Nonlabens sediminis
  REGION 1..345: note = tr|A0A090Q3T7|A0A090Q3T7_9FLAO Isochorismate synthase OS=Nonlabens sediminis OX=319236 GN=JCM19294_191; PE = 4 SV=1
MNSPFLHQVSQLLAQELPFFVLKKSNENRVNLFYQSDQEWHRTTPLEEDYIVFAPFLKEQHSVYIPVENSISFPWTHQKVESTLPEFDKEVNKDEYLMLVNKAINNLQEGDLRKVVLSRKQTIKSHLSQVKLLERLLNLYPTANSYFFYHPKVGAWMGATPELLLKIENTTLKTMSLAGTVAYDGVTDIYWGKKEREEQQLVTDYIVEQLKMTNATDIETSQPQTVQAGAICHLKTDIKAQINPNDMYKYLNALHPTPAVCGMPTKQALQFIKENEGYDRSFYTGYLGVVNNNNKNAEFFVNLRCIELNDKTATLYVGGGITALSHAQAEYLEIVNKMGTMLRVL

SEQ ID NO: 94426 - protein, 345 aa, Nonlabens sp.
  REGION 1..345: note = tr|A0A3S9MZH3|A0A3S9MZH3_9FLAO Isochorismate synthase OS=Nonlabens sp. MJ115 OX=2496866 GN=EJ995_10540; PE = 4 SV=1
MRENLLSYTQELLEQDLPFLLLRQQGEPRVKILSQNDKKLHKTATDTMSYAVFSKFQNTENQIIIRGDVIQEFRWSLSGVIDTSTTVKLDVEDKHSHIKLVNRAVQHIQNSELQKVVLSRKVTVQQESSIMDILSRLLDNYPDANCYLFHHPAVGTWLGATPEILLSYKDGMVKTMSLAGTMSAQNKEAVQWTIKEQEEQELVTRFISSQLSKVTDQIETSKVETIKAGELYHLKTDITARVRNEDLDKCLALLHPTPAVCGVPRDLALDFIRDHENYDRSFYTGYLGIVQPKGQEAKYFVNLRCMKIEANQISLYAGGGITAMSDPIAEYQETENKLRIMSRLL

SEQ ID NO: 94427 - protein, 359 aa, unidentified
  source 1..359: note = Nonlabens ulvanivorans
  REGION 1..359: note = tr|A0A090PNV9|A0A090PNV9_NONUL Isochorismate synthase OS=Nonlabens ulvanivorans OX=906888; GN = JCM19297_2563 PE=4 SV=1
MREKLFQYLSFLLEQNLPFLALKAADSNEVKVVAQNDQTWYKTAPDNVAYAVFSKFQNNENQVYIAGEKILNFKCEVSVSQPKINQSIIPEDGKVAYLELFKKAMVRLEKKQLSKVVLSRKQEFAIRDSDIDIYERLIDTYPTANCYFFYHPQVGKWMGATPELLMNVQSDGLHSTQSRTDAIPVKVSTMSLAGTAVDDGGLNHEWGGNKEIEEQQLVTDFIIAQFNESGAIDMKQSPVQTVKAGHLIHLRTILQARSSSNQIKNLLNALHPTPAVCGLPRNESMQFIINNESYDRSYYTGYLGIVDGASHHYYVNLRCMQLLDRTAVIYVGGGVTAKSDAMLEYQETRSKLQTMHRLL

SEQ ID NO: 94428 - protein, 358 aa, unidentified
  source 1..358: note = Nonomuraea gerenzanensis
  REGION 1..358: note = tr|A0A1M4EFK7|A0A1M4EFK7_9ACTN Menaquinone-specific isochorismate synthase OS=Nonomuraea gerenzanensis; OX = 93944 GN=BN4615_P7080 PE=4 SV=1
MAVPPGPGRFAWARQWLATVLGDAQVHDDVRTPGSGAVAFGSFTFDEDAHGSVLVVPRALLARRDGHAWLTTIGDAPLETFTPVRDPGRISYGDGSLTAPEWEHVVARAARRIREGELEKVVLARDLVATAERPIDVRLLLSRLAARYPECYTFSVAGLVGATPELLIRRTGQEIESLVLAGTAARGTSAADDLARGAALLASAKDRHEHECAIASVRETLSPLCSALTTPDEPELLMLPNVQHLASHVTGRLADGASVLDVVAAMHPTAAVGGTPTKTAIQVIRELEGMDRAGYAGPVGWIDANGDGEWGIALRSGLVQGRRARLFAGGGIMGDSDPAAELAEAQAKFRVMQYALEG

SEQ ID NO: 94429 - protein, 409 aa, Nonomuraea sp.
  REGION 1..409: note = tr|A0A5D0QCM6|A0A5D0QCM6_9ACTN Isochorismate synthase OS=Nonomuraea sp. PA05 OX=2604466 GN=FXF51_17110; PE = 4 SV=1
MSVALGTTRPLPVRTTPVGDPGDLLASLPRTAPYAWIRNGEGLVGWGEAARVAVPPGPGRFAWAREWLATVLGDAQVRDDVRTPGSGAVAFGSFTFDEDAHGSVLVVPRAVLARRDGHAWLTTVGDAPLETFTPVRDPGRISYGDGSLTAPEWQGVVARAARRIREGELEKVVLARDLVATTERPIDVRLLLSRLAARYPECYTFSVAGLVGATPELLIRRTGQEIESLVLAGTTARGTGAADDLARGAALFASAKDRHEHECAIASVRQTLAPLCSSLTTPDEPELLVLPNVQHLASHVTGRLADGASVLDVVAAMHPTAAVGGTPTKTAIQVIRELEGMDRAGYAGPVGWIDANGDGEWGIALRSGQVQGRRARLFAGGGIMGDSDPAAELAEAQAKFRVMQYALEG

SEQ ID NO: 94430 - protein, 471 aa, unidentified
  source 1..471: note = Nostoc punctiforme
  REGION 1..471: note = tr|B2IZ87|B2IZ87_NOSP7 Isochorismate synthase; OS = Nostoc punctiforme (strain ATCC 29133 / PCC 73102); OX = 63737 GN=Npun_F6461 PE=4 SV=1
MTVSPCRNNLFVERKDLYQFLLLVQEKCLQNNDKQIVSISQEIDLVDPLLVLDRLTQANEINFYFEDRAKGEAIAAIDSVAKLQIDGADRFAQAEYFIKSCLKNIINFSNANQPFSGPHFFSYFSFFDKNIQVDYPFPSATIFLPRWQVAVKNQRCILVTNIILNENTNIQRLLENVQNKIEFIQSLEYYSPNIDSFPKNLYKKSVTNATQFKRSVVSVLEKIRSSHLSKIVLADILDVKSSNHFDLIKSLNNLRQIHPNCYIFSTSNGKGQNFIGASPERLISINNQQLITDALAGSAPRGKTPTEDAANANRLLNSEKEKHEHSLVLNFITQRLSELGLSPQILAPRLRQLSNIQHLWTPISAIVPANIHPLKIVGQLHPTPAVAGAAQDVACAEIRRYESFERGLYAAPLGWIDSQGNCEFIVGIRSALINGDRARLYAGAGIVAGSDPDKEFAEVQLKLQALLKALV

SEQ ID NO: 94431 - protein, 471 aa, Nostoc sp.
  REGION 1..471: note = tr|K9Q806|K9Q806_9NOSO Isochorismate synthase; OS = Nostoc sp. PCC 7107 OX=317936 GN=Nos7107_0581 PE=4 SV=1
MTVSPCRNNFFVTHKDIYQFLSAVHENCLNNNCRQIVSISLEIDWVDPLVVLAKLAQANEINFYFENRGKGEAIAAIDTVAKLQIDGQDRFNQAEYFIKNCLKNIIYFGDIHQHFASTRFFCYFSFFNQNIQSDYPFPSATIFLPRWQIAVKNQRCILVANILITANANLEKIWHNLWSKIELINSLEYFSPKLDFLSTHFSKQSVTQGTEFKRSVVSALQKIQASHLSKIVLADALDVRANHQFDLYKSLDNLRQIHPNCYVFSTSNGKGQNFIGASPERLICIQNQQLITDALAGSAPRGKTPEEDAANANRLLNSEKERHEHSLVIDFITQRLSQLGLSPQVLPPRLRQLSNIQHLWTPISAIVPANVHPLKIVAQLHPTPAVAGAARDVACAEIRRYESFERGLYAAPLGWIDSQGNCEFIVGIRSALIDGDRARLYAGAGIVAGSDPDKEFAEVQLKLQALLKALV

SEQ ID NO: 94432 - protein, 387 aa, unidentified
  source 1..387: note = Notoacmeibacter sp.
  REGION 1..387: note = tr|A0A3L7JFI5|A0A3L7JFI5_9RHIZ Isochorismate synthase OS=Notoacmeibacter sp. M2BS9Y-3-1 OX=2448481; GN = D8780_10385 PE=4 SV=1
MTVETNTARTLDEKDALFAFQSRHHAFRGLGRAAMLPRGNASTISERSGAFFAKAGAEAILAGALPFDRGGDDYLWQAEQVVPARSWALPRPAPPLRWNLRAEPDAAEYAKAVGNALRIMAADTDGSDRLTKIVLARSLLATADHDIDVEALFGKLATDPAVTAFLVPLPEKDGRPRLMAGATPELLLEKTGTQIVSHPLAGSAKRHDELARDAEAAAALNRSVKDRSEHAIVVEFILDMLAPYCSDLRRPDGMTVTSTRSMWHLGTRIEGELKNPDVPAVVLASALHPTPAVCGLPRDRCTRLIRDLEPAERDFYAGSVGWCDGKGDGAWYVTIRCAEICGAQARLFAGAGIVPQSDPVAEAAETGAKFNAMLNALGIDPSLEAFS

SEQ ID NO: 94433 - protein, 441 aa, Obesumbacterium proteus
  REGION 1..441: note = tr|A0A4Q9D2S6|A0A4Q9D2S6_9GAMM Isochorismate synthase MenF OS=Obesumbacterium proteus OX=82983 GN=menF; PE = 3 SV=1
MVHLSVLVERIIPLLRQAAAEQSGLVRIALPCSLKDGTQMLEWLASQPLFPQFYWRHRDGAEEAAVCGAVRTFTDAEQAQKFVQENGCPELRIWGLNAFGQVELDGYGTINSLLFLPRIALMRHAGKAELVVYLYGEASLKQDLELALRDLAALCAIQPLPILHTDVLAAHHQPDHDAWCDLLNNALAEIEHKAFEKVVLARRTTLKLSLPLRAAQFLAASRAVNHRCYHFMLALAPERAFLGSSPERLYRRQNLSLETEALAGTVASGNSDAQAQENAQWLMSDRKNQHENLLVVDDICQRLQGGAQALDVMPAEIIRLRKVQHLRRPIHATLVQSNDADCLRRLQPTAAVAGLPREPARQFIMQDEPFDRGWYAGSAGYLSQDQAEFAVALRSALIEHDHIHLYAGAGIVAGSDPEQEWLEIENKAAGLRTLLESDISL

SEQ ID NO: 94434 - protein, 461 aa, unidentified
  source 1..461: note = Oceanobacillus arenosus
  REGION 1..461: note = tr|A0A3D8PRH5|A0A3D8PRH5_9BACI Isochorismate synthase MenF OS=Oceanobacillus arenosus OX=1229153; GN = menF PE=3 SV=1
MIEIKEVQVEALFEKVIQGLQNNENARLVSITKKIQTTDALEFYEQARFMGKNRTFWTNSNRSLFLVGIGEAYEIVANQSRFKETKQQWDHLLEQAVIHNPYQLPGTGVIALGGMSFDPKKNTTELWKHFKPSQFMIPEFQLANYQDESYFTMNVFVKKDDHPGQLAAATRQLEAKLLQPNHLEAEALTIDKRVEIDPEGWKESVRTATSEIRNKKAEKIVLAREVRLTFNKKAESGAIINKLLDTQANSYIFAFEKLEDCFIGATPERLVKVEQDQLLSTCLAGTAPRGETKAEDDRISNELLHDEKNRQEHDFVVQMIKRSIKDYCTDLVIPDVPVVYPLKNLQHLYTPVTAKLKAGYSIFDIIEQLHPTPALGGTPREESLAFIRENEALDRGWYGAPVGWLDSNQNGEFAVAIRSALIHGDSASLFAGCGVVKNSDPEEEYEETNIKLMPMLSVLGG

SEQ ID NO: 94435 - protein, 464 aa, unidentified
  source 1..464: note = Oceanobacillus bengalensis
  REGION 1..464: note = tr|A0A494YWB6|A0A494YWB6_9BACI Isochorismate synthase MenF OS=Oceanobacillus bengalensis OX=1435466; GN = menF PE=3 SV=1
MIDLKHEQVEALLEKSIYGLNNDDFQLVSYTKRINTVNPFQFFEAAKQTEKNRIFWMSSNKEFYLVGIGCASEMMSEKSETRFNETKDKWNNVLNKAVIHNGYEVPGTGIVALGGMSFDPEKQTTTLWENYKASHFVIPEYMLTVYRDTCYLTVNVKVTKNDHPTQLANEIKDMESTLCHETIIEDEILSIINKEEIDALQWKETVRKATDEIKKASADKIVLAREMRLTFNRRANIGLILQNLLESQPNSYIFAFEQGEDCFVGATPERLVKLENARLFSTCLAGTAPRGKTPEEDSVIRYELLHDEKNLEEHQFVVQMIKAAMEDYCTDLKIPSEPVIYPLRNLQHLYTPVTGILKKGFSIFDIIEKLHPTPALGGSPKDKSLVFIRENEVLDRGWYGAPVGWMDSNNNGEFAVAIRSALVQGDEASLFAGCGVVKDSIPEQEYEETNMKFLPMLSVLGGQA

SEQ ID NO: 94436 - protein, 461 aa, Oceanobacillus caeni
  REGION 1..461: note = tr|A0A0N0M7C9|A0A0N0M7C9_9BACI Isochorismate synthase MenF OS=Oceanobacillus caeni OX=405946 GN=menF; PE = 3 SV=1
MIELKEEQVETILEKAIEGINSDDDYQLVSMTKKIKYNNALSFFEAAKYIKKNRTFWMSSEEDFYLVGIGQAYEIIAEESRFEETKKAWNQLLEKATIYNPYEQPGTGIVALGGLSFDPKKPTTPLWENFKPSHFTVPEFLMTKHNRECYLTVNILVRKNDHPRQLANEWRDLENSLFQKASIEKQMLTITEKKEIEPTEWKETVRKAKEKINHSDIEKIVLAREMYLRFNENANIGSILQKLLDTHPSSYIFAIEKDEDCFLGATPERLVKLEKDHLLSTCLAGTAPRGKTKEEDQAISEGLLHDQKNREEHDFVVKMIKNAIKDCCTHLDVPNEPIIYPLTNLQHLYTPVTATLKKEYSLFDIIEKLHPTPALGGTPKEASLQFIREYERLDRGWYGAPIGWLDSNQNGEFAVAIRSALIKDTEASLFAGCGVVKDSNPDEEYEETNIKFLPMLSVLGG

SEQ ID NO: 94437 - protein, 461 aa, unidentified
  source 1..461: note = Oceanobacillus chungangensis
  REGION 1..461: note = tr|A0A3D8PXW1|A0A3D8PXW1_9BACI Isochorismate synthase MenF OS=Oceanobacillus chungangensis OX=1229152; GN = menF PE=3 SV=1
MIEIKEGQVEALFEKVIQGLQNNEDARLVSITKKIQPIDALEFYQRASYMGKNRTYWTNSNRSLYLVGVGETFEITAAQSRFKETKQKWDKLLEQAVIHNPYKLPGTGVTALGGMSFDPKKETTELWKHFKPSQFTIPEFQLTIYQGESYYTINVLINKDDHSGQLAASIQRMEETLFQTIQVEPESLTIEKKVEINPERWKETVRAATSEILNKKVEKIVLAREVRLSFDKQVKSSVVIDKLLDTQANSYIFAFEKNNHCFIGATPERLVKVEQDNLLSTCLAGTAPRGETREEDERISEELLHDQKNREEHDFVVQMIKQAIKDHCTDLVIPDEPVVYPLKNLQHLYTPVTAKLKEGYSIFDIIEQLHPTPALGGTPREESLAFIRENELLDRGWYGAPVGWLDSNQNGEFAVAIRSGLIHGDTASLFAGCGVVKDSDPEAEYEETNIKLMPMLSVLGG

SEQ ID NO: 94438 - protein, 462 aa, unidentified
  source 1..462: note = Oceanobacillus halophilus
  REGION 1..462: note = tr|A0A494ZU98|A0A494ZU98_9BACI Isochorismate synthase MenF OS=Oceanobacillus halophilus OX=930130; GN = menF PE=3 SV=1
MIEIKHRQVEELIEKAIQKISKDEEYRLVSITNKIENFDALQFFEGAKHIEKSRTFWTNSDKDFYLVGIGQVYEILAEESRFTGTKKAWRDILSKALIYNPYESPGTGIVALGGMAFDPKKEPSAIWSNYKQSHFTIPEFLLSVNKDDCYFTVNIQVRKDDLPTQLANEIERVERILFAHSELEIQDLTIQFKNEIAPFEWKNTVKKATEEICQGKAEKIVLAREIRLKFNERASITSVLRKLLETQPNSYIFAFEKGNDCFIGATPERLVKREKEHLLSTCLAGTAPRGKTAEEDKQIGKELLHDPKNRKEHDFVVQMIKQAMEDYCTDLEVPNNPVIYPLRNLQHLYTPVTATLKQGYSIFDIIENLHPTPALGGTPTEESLAFIREHEHMDRGWYGAPIGWLDSNQNGEFAVAIRSALVQGEEASLFAGCGVVKDSDPEAEYEETNIKFLPMLSVLGGQ

SEQ ID NO: 94439 - protein, 462 aa, Oceanobacillus iheyensis
  REGION 1..462: note = tr|A0A2P1WLG6|A0A2P1WLG6_9BACI Isochorismate synthase MenF OS=Oceanobacillus iheyensis OX=182710; GN = menF PE=3 SV=1
MIELKEENIEAVFQEAIDMIQPQNSRLVSITKRVEAIDPLSFYDAAKQLRTERLYWSSTAEAYTLVGTGCAFEITAIKDRFETAEQEWHNLLNDAVSNNPYDVPGTGIVSMGGAAFDPEKEKTKLWANFEPIRFTVPEYLLTEYENDFYFTMNIMVRADDHPRQLANQLREMEGQLLNGTPRYESDTQIVGRHEISPEKWKQTVKLATEEIRQQKVEKIVLAREVRLKLDREADSGNILRKLLNTQSNSFIFSFERGKDCFIGATPERLVKIRQNSLFSTCLAGTAPRGETEEEDARISHNLFHDQKNRGEHDFVVQMMKKAIENYCTDIEIPNEPVVYPLKNLQHLYTPVTARMKKDYTILDIIKKLHPTPALGGTPRKESVAFIRKHELLDRGWYGAPVGWLDNRDNGEFAVAIRSGLLQGDEASLFAGCGVVKDSDPEEEYEETNIKLTPMLSVLGGAE

SEQ ID NO: 94440 - protein, 461 aa, unidentified
  source 1..461: note = Oceanobacillus limi
  REGION 1..461: note = tr|A0A1I0DN58|A0A1I0DN58_9BACI Isochorismate synthase MenF OS=Oceanobacillus limi OX=930131 GN=menF; PE = 3 SV=1
MLKVKEDILRSLLDKAIQTIHTNEIKLVSYTKQIDEANPLAFFEAGKYMQGNRTFWKSSIDDYFIVGVGSALELATDNSTITYIENKWQNLLQDAFIHNPYETPGTGIVALGGMAFDPKKERTELWKEFNSSQFTIPAFTLTKYNNNYYLTTNVQVTANDHPEQLFNQLKDKEEQLIVESVDFPENTSVVSKDEIQPEVWKQTVKHATEQIKKHVADKIVLAREVRLELSKKAEPTAVLDQLAQTQPNSYIFAFDHGEGCFIGATPERLVKLEESQLLSTCLAGTAPRGETLEEDEKYKITLFNDQKNREEHDFVVQMIKNSMEDYCDNIDVPNEPSILQLRNLQHLYTPVRAKIKDGFSIFDVIDKLHPTPALGGTPREASLQFIRENEQLDRGWYGAPIGWLDSNQNGEFAVAIRSGLIQGKHASLFAGCGIVKDSDPEAEYEETTIKLLPMLSVLGGA

SEQ ID NO: 94441 - protein, 466 aa, Oceanobacillus oncorhynchi
  REGION 1..466: note = tr|A0A0A1MPE7|A0A0A1MPE7_9BACI Isochorismate synthase MenF OS=Oceanobacillus oncorhynchi OX=545501; GN = pchA PE=3 SV=1
MIEVKEKQFTAELEAAIQSVHTDQKNKLFSYTEKINPVNLYRFLEKAADLKLPRTFWSSANEDFQMAGAGHAFELSAKDSPSRYEQVEQEWHALLSDAVIYNPYHVSGTGVVALGGFSFDPLKPQTKLWENFPCSHFSIPNYILTHAEGNYYLTLNRFICTDETYAGVLEQLQDHRQTLLNNAENKRDGYVLHIQRKTEIDPEQWKETIKKATDVMKNTAVDKIVLAREVRLHFNQSANIPDILKRLVDTQPNTYVFGYEMGEDCFLGATPERLVKVKDDEVLSTCLAGTAPRGETMEEDEQIADNLFRDPKNREEHDYVVQMIRNTMEAYCTDVNVPFEPAVHQYKTLQHLYTPVRAKLKKNHRIFSIISGLHPTPALGGTPRQEALAFIRENELLDRGWYGAPIGWMDSNNHGEFAVALRSALIQKDEASLFAGCGIVEDSIPESEYEETNIKLMPMLSVLGVD

SEQ ID NO: 94442 - protein, 462 aa, Oceanobacillus picturae
  REGION 1..462: note = tr|A0A0U9H147|A0A0U9H147_9BACI Isochorismate synthase MenF OS=Oceanobacillus picturae OX=171693 GN=menF; PE = 3 SV=1
MIELKEENIEGVFQEAIDTIHPQNSRLVSITKRVEAIDPLSFYDAAKQLRTERLYWSSTAEAYTLVGTGCAFEITAIKDRFETAEQEWNNLLNDAVSNNPYDVPGTGIVSMGGAAFDPEKEKTKLWANFEPIRFTVPEYLLTEYENDFYFTMNIMVRADDHPRQLANQLREMEGQLLNGTPRYESDTQIVGRHEISPEKWKQTVKLATEEIRQQKVEKIVLAREVRLKLDREADSGNILRKLLNTQSNSFIFSFERGKDCFIGATPERLVKIRQNSLFSTCLAGTAPRGETEEEDARISHNLFHDQKNRGEHDFVVQMMKKAIENYCTDIEIPNEPVVYPLKNLQHLYTPVTARMKKDYTILDIIKNLHPTPALGGTPRKESVAFIRKHELLDRGWYGAPVGWLDNRDNGEFAVAIRSGLLQGDEASLFAGCGVVKDSDPEEEYEETNIKLTPMLSVLGGAE

SEQ ID NO: 94443 - protein, 461 aa, Oceanobacillus profundus
  REGION 1..461: note = tr|A0A417YMU9|A0A417YMU9_9BACI Isochorismate synthase MenF OS=Oceanobacillus profundus OX=372463; GN = menF PE=3 SV=1
MIEIKEDQLASLLNGAIEQLQAEDDRRLVSFTKKIATTNPLQFFEAAKHIFENRTFWTSSSQMLWLTGVGNAFEMGADKSRFEVIEAAWNKMLNEAYIHNPYEVPGTGIVALGGMSFDPINAQTELWKKFRPSQFRVPEFLLTKYNSSYYLTINVCVRKNDHAKQLAEELRQIEQKLLLGQKVPDDILHIVDESEMDPEKWMDIVRQATDEIRNQHVEKIVLARELRLTFNRHAEISSILNNLLKTQPNSYIFAYEIGDDCFVGATPERLVKVEKNKLLSTCLAGTAPRGKTEEEDMKISEALLNDEKNRQEHDFVVQMIKHGIKDYCTEMTIPEVPVVRPFKNLQHLYTPVTAQLRDGFTILDIIKQLHPTPALGGSPKAESLAFIREHELLDRGWYGAPIGWMDSSNNGEFAVAIRSALIQKNQASLFAGCGVVKDSDPQSEYEETKIKLLPMLTVLGG

SEQ ID NO: 94444 - protein, 466 aa, Oceanobacillus sojae
  REGION 1..466: note = tr|A0A511ZMJ9|A0A511ZMJ9_9BACI Isochorismate synthase MenF OS=Oceanobacillus sojae OX=582851 GN=menF; PE = 3 SV=1
MIEVKEKQFTVELEAAIQSIHTDQKDKLFSYTEKINQVNLYRFLEKAGVLKLPRTFWSSADEIFQLAGAGHAFELTAEISKYRYDQVEQKWNALLDDAVIYNPYHTSGTGVVALGGFSFDPLKPQTKLWGNFPESHFSIPSYILTYTDGNYYLTINRFIRAGESYSSVLEELQNNRQALMDNTDSPHNASVLRVQSKQEIAPDLWKETIKKATDVMKKTAVDKIVLAREVRLHFNQSANIPDILQRLVCTQPNSYVFGYEMGEDCFLGATPERLVKVKDDEVLSTCLAGTAPRGETIEEDEQIANNLFQDPKNREEHDYVVQMIRSTMEAYCTDIVVPDEPVVHQYKTLQHLYTPVRAKLKEDHRIFSIISGLHPTPALGGTPRQDALAFIRDNELLDRGWYGAPIGWMDSNNHGEFAVALRSALVQQNEASLFAGCGIVEDSVPESEYEETKIKLMPMLSVLGVD

SEQ ID NO: 94445 - protein, 461 aa, Oceanobacillus sp.
  REGION 1..461: note = tr|A0A345PIK5|A0A345PIK5_9BACI Isochorismate synthase MenF OS=Oceanobacillus sp. 160 OX=2052660 GN=menF; PE = 3 SV=1
MIDIKEVQAEALFAKVIQGLHNNEDAQLVSITKKIQTIDALDFYRRARYMGRNRTFWTNSNRSLFLVGIGEAYEIIADQSRFKETKQQWDNLLKQATIHNPYQLPGTGVIALGGMSFDPKKETTELWKHFKPSQFTIPEFQLTNYQGESYYTINVFVKKNDHPSQLAATIRQIEQTLFQASQVEAESFSIEKKVEIDPEGWKESVRVATSEIRNKKAEKIVLAREVRLSFDKQPESSVIIDKLLDTQANSYIFAFEKNSHCFIGATPERLVKVEQDRLLSTCLAGTAPRGKTKAEDERISYGLLHDQKNRQEHDFVVQMIKLAIKDYCTDLVIPGEPIVYPLKNLQHLYTPVTAKLKAGHSIFDIIEQLHPTPAVGGTPRDESLAFIRENELLDRGWYGAPIGWLDSNQNGEFAVAIRSGLIHGDMASLFAGCGVVKDSNPEAEYEETNIKLMPMLSVLGG

SEQ ID NO: 94446 - protein, 384 aa, Odoribacter sp.
  REGION 1..384: note = tr|A0A416W6E5|A0A416W6E5_9BACT Isochorismate synthase OS=Odoribacter sp. AF15-53 OX=2292236; GN = DWW52_09290 PE=4 SV=1
MENTMTEKTENKLSVAEAQAICLRNNIPFYTYRLPGSHEVIFGAQLSNDTRIFKGFEKHRGEKGFVITPFNHASWSFPFFIKADLSFTDYLTDGESIQNLRNTVFNTPGRIFTKQDCEHFEYLDELRTMIETLKREGMRKAVLSRTITLPCDSLRLAPVIFEQMKQYHHAFLFFAAIPGKCAWMGASPETFLKYDRNGFFTMSLAGTQSVATAKTPPEWSDKDIEEQQIVTDYIHDTLRHYFTRHLDIEGPITLQAGNVFHLCTFFRSDEQLPADQIDELVTQLHPTPAVCGLPKKRAMQIISEIEKQERGYYAGFLGPLQASGAFDLFVNLRTMEVFDDALRLYVGGGITPLSDPETEWQETCQKADTLLNLIRQINYGKVTF

SEQ ID NO: 94447 - protein, 363 aa, Odoribacter splanchnicus
  REGION 1..363: note = tr|F9Z4W4|F9Z4W4_ODOSD Isochorismate synthase; OS = Odoribacter splanchnicus (strain ATCC 29572 / DSM 20712 / CIP 104287 / JCM 15291 / NCTC 10825 / 1651/6) OX=709991; GN = Odosp_0381 PE=4 SV=1
MTVAEAQTLCLKQGTPFYSYRLPGERESVFGAQLDGEVAPFRQVGEQGKGFILVPFAESEEVPAWFIRGDITFREVTTDIEIRTGLSGTMGLTDIKPGQEPDISWEEYESQVAAMVAALKQGQVRKMVLSRTITLQERAYEKAAVWYTALADRYPEAFVFLVFVPGKTCWLGATPEIFLRQSAAGTETMALAGTRRVGTSGAWGQKEIEEQAIVTEYMAELLETVCGEKWRQEGPFSKQAGQVEHLCTVFRHVGKLTPGLTDRVRRALHPTPAVGGVPAGSALPMIRRIEGRNRRYYAGYVGPVSGDGCWDWFVNLRSMELWPDRIRLHIGGGITALSDPRKEWEETELKSRTLLDIVQYSDK

SEQ ID NO: 94448 - protein, 470 aa, Oerskovia enterophila
  REGION 1..470: note = tr|A0A163S913|A0A163S913_9CELL Isochorismate synthase DhbC OS=Oerskovia enterophila OX=43678 GN=dhbC; PE = 4 SV=1
MTAHAHPRRDADDLGAPPAGSPRPGSTDFPAAPRLVVRTTRLPEGLPGDLTALLDLLPDARPLAWVRRGDGIVGWGEALRLEAWGPGRFADAEAAWQEVLGAAVVHDDVDLPGSGLVAFGSFAFDDASGTAGDARPGGTIVVPRVVVGRRGGPEGTAWVTSITQGDALPDDVASVLDPARRERVAGPGAVATVDGSLSAEDWTEVVAEGVERIRRGDLEKVVLARDVLATAEHPVDPRWMLRRLAVAYDACWTFSVDGMVGATPELLVRSEKGLVTSRVLAGTIRRSGGAEADDDSLLRAAHLARSSKDLEEHEYAVASVADALAPFCSSMNVPDAPFVLHLPNVLHLASDVTGVLAAGTGGSPAPTSLALAAALHPSAAVCGTPTLAARDLIREIEGMDRARYAAPVGWFGADGDGEWGIALRSAELSPQDPHRVRLFAGCGIVAASDPGAELAESEAKLEPMRYALGG

SEQ ID NO: 94449 - protein, 418 aa, Oerskovia turbata
  REGION 1..418: note = tr|A0A4Q1L0F2|A0A4Q1L0F2_9CELL Isochorismate synthase OS=Oerskovia turbata OX=1713 GN=EQW78_02765 PE=4; SV = 1
MTGFTVLDPAETVVAPDPAHARHHGSPSDAPDAAAPLGHGEFRLASPDVGLVAHGVRERLDVPSWDGPTVAAAARDLLARAASARWAGEPAPILVGTIPFDPSRPAHLVVPAHQSWRPVVAAGAPGETIEEAPLPVARPEGALPGRDDVVFRAAVGRAVSRLEDGVAEKVVLARTLDVSAAGPLDRGVVRAAMRCANPDAYVFDVELPGDQGHLIGASPELLVSVRDGVLHSHPLAGSAPRSADPEEDRATGQRLLTSEKDLREHAFVTAAIREVLRAYVAHEDDLDVPTSPELVATSHLWHLGTPVTARLRPGVSVLDVVYALHPTPAVCGHPQAAARELIGSLEPFDRGFYTGLVGWADQAGNGEWAIVLRCGVVRGADVRLFAGAGVVVGSTPEGEHAETAVKFSTLLSALGVVS

SEQ ID NO: 94450 - protein, 497 aa, unidentified
  source 1..497: note = Okeania hirsuta
  REGION 1..497: note = tr|A0A3N6NW51|A0A3N6NW51_9CYAN Isochorismate synthase OS=Okeania hirsuta OX=1458930 GN=D5R40_01980 PE=4; SV = 1
MPAIPTSVNLFQSCQDLHQFLLNCQQTLTEQVQKKVISISVEILPVDPLAVLQEICEPHQLHFYLEKQIIGKTNTEKNTLAIAAADAATHLTVMGGNRFSQARSFIQSCLNNTIVLGATHLPFSGPHFFCSFTFFEQDSQINLHISQNGNYQEKPSINSHFPSATIFLPQWQITQKNNRCILVINTVITTSINIKNISQIIWQKYQQITQINNTSLSSLIKPRGNLRKINPNHLQDFKKSVASALDLINSNSLKKIVLAHAIDIYSQTPVNLIQSLNNLRFIYPDCYVFSTSNGKGQNFIGASPERLISINNNQLITDALAGSAPRGKTSTQDVKLAKSLLCSEKDLREHQFVIDFIIKHLQDLGLNPHYPPQPHLLQLSNIQHLWTPITAEISQNIHLLEILAELHPTPAVAGVPRDTAQQQIHNFETFERSLYAAPIGWIDYQGNGEFVVGIRSALIDGDRTRLFAGAGIVTGSKPEKELAEVQLKLQTLLKALV

SEQ ID NO: 94451 - protein, 461 aa, unidentified
  source 1..461: note = Omnitrophica sp.
  REGION 1..461: note = tr|A0A1G1NDZ6|A0A1G1NDZ6_9BACT Isochorismate synthase MenF OS=Omnitrophica WOR_2 bacterium RIFCSPHIGHO2_02_FULL_48_11 OX=1801856 GN=menF PE=3 SV=1
MSMSVLREKVKVNQAIGALTDQIQDFDQKALVCKTQAAILRFAVEIESADLIAWLQRQDHFPKFFWADREGQEEVACAGAAHVLTGKGRMNHQFIFDEMQRRLSPDQEHLRYYGGMCFDFQNSDENWKDFGSHYFFIPRFELIKQKKQFIFACNITREEFNQGLLNKVLADLRKIDFSSHVLPARLPKIQKREDYPSDKKWQNIISEELAAITKNDYKKIVLARKSSFRMSAPLEAADILRNLQKVSPHCFYFYLQPKAGAAFVGASPERLYKREGQTIQTEALAGTRPRGSNPQADEKLKKELLNSTKEVHEHQLVVEQIRHVLAELCKDLTIDPKHSLLQLEGGQHLLTRIKGVLLPPVDDARILFVLHPTPAVAGWPTEKILDIIKSREPFARGYYAGPLGYIGWDAAEFAVAIRSGLIQKNTLAVYAGAGIVQGSTAKAEWNEIENKMQIFLKAIEL

SEQ ID NO: 94452 - protein, 472 aa, unidentified
  source 1..472: note = Opitutaceae bacterium
  REGION 1..472: note = tr|A0A556QNJ7|A0A556QNJ7_9BACT Isochorismate synthase OS=Opitutaceae bacterium 53C-WASEF OX=2597822; GN = FPL22_02620 PE=4 SV=1
MTILPINPTENASPDALIGFLRQCREAARGDGRERLVSISIQVGALDPLAVLEAIFESGELHFYAERPNIHTAIAGAEAVLVHEASGPERFESAQRFIDDVLARTIAVGDVDAPFGGPHFFSAFTFLDQVEQGEAFPAARVFVPRWQVARAGEVTTAVANLLVAPDSDLATLAERVLRAHGKFKHIDYDAKPAVPVTSQPCVFQTTEAGDFRTTVKGGLAAIAAGVVKKIVLARVQDMQTNAPLHPLRLLNGLRERFPECYSFSVANGRGQSFIGASPERLVRVSKGVLETEALAGSARRGQSASEDAALGAELLASEKDRREQGHVLESIVRRLEPLGFAPQFPSQPVLRKLANVQHLHTPVSAVMPAGIHLLDALARLHPTPAVGGSPREEAVARIRDLEGFPRGLYAGAIGWLNARGGGEFLVGIRSALVEGRNARVYAGAGIVAGSDPEREFAETELKFRAMREALLG

SEQ ID NO: 94453 - protein, 458 aa, unidentified
  source 1..458: note = Ornithinibacillus halophilus
  REGION 1..458: note = tr|A0A1M5K6I5|A0A1M5K6I5_9BACI Isochorismate synthase MenF OS=Ornithinibacillus halophilus OX=930117; GN = menF PE=3 SV=1
MLELKEEQLESILEKGIKQAKNIQLVSVTKKIPTNDPVSIFNAAKIMKKQRSYWRSAEDNFTVVGVGSAFEIKTNKNTYQETDKQWNSILRDAIIHNPFKNEGTGLVAIGGMSFDSKKEKTALWNNFDDSQFVIPEFVYVQNNVEAYLTINVRVNGTEDVTNLSREIQLQEDQLLTETVTAFKTNAIVSKTEVEPQQWKKTVQLATEEMKKSDVAKIVLARELRVKLSKEAHIESIIQDLVNQQPNSYVFAFEYGEDCFIGATPERLVKKEKSQLLSTCLAGTAPRGKDVVEDEKIRKGLLNDKKNREEHDFVVQMIRKAITPFARDIAIPDAPVVLQLKNMHHLYTPVTGIIKENSSLFDIVEKLHPTPALGGTPKEEALSFIREHELLDRGWYGAPIGWLDSNENGEFAVAIRSGLIQKDEASLFAGCGVVADSNPEAEYEETNIKFTPMLSVLGG

SEQ ID NO: 94454 - protein, 460 aa, Ornithinibacillus sp.
  REGION 1..460: note = tr|A0A3C1HXL7|A0A3C1HXL7_9BACI Isochorismate synthase MenF OS=Ornithinibacillus sp. OX=1898027 GN=menF; PE = 3 SV=1
MIEVKEETLESTLVRVIQGLHSSESRLVSFTKKIQPLNPLHFFEAGLTLHMNRSYWHSTIDDFVMVGIGSAVSIHEDSQAISSLEEKWESVLKEAVINNPYQIPGTGIAAIGGMAFDPHKPKTALWNKFTNNELRVPTFLLLVNQQGTFLTTTILVDGMDDPKLLIRQLADQEKALLSYQNIDHKKPVIVGREEVEPEQWKETVKHATEYIAKGQVEKIVLARELRLTFSEEVGLTDVIKQLIDTQPTSYIFAYEKGTDCFVGASPERLIKLEGNQLLSTCLAGTAPRGRNELEDDKIGYQLLHDEKNLQEHDFVVQMIKNSVEEFCQKMEIPKKPVLYRLRNLQHLYTPVRGIFKEGYSIFDVIEKLHPTPALGGEPRKEALSYIRESELLDRGWYGAPFGWIDSNQNGEFAVAIRSGLIQGNTASLFAGCGVVRSSDPEAEFEETRIKFLPMLTVLGG

SEQ ID NO: 94455 - protein, 446 aa, Ornithinimicrobium sp.
  REGION 1..446: note = tr|A0A345NR11|A0A345NR11_9MICO Isochorismate synthase OS=Ornithinimicrobium sp. AMA3305 OX=2283195; GN = DV701_16310 PE=4 SV=1
MPSLDPAAGAELPGRIRVRSEAVDVTGDLLARIPDEVDPRDVVTWLREGDGMVGWGRAALVRTHGPDRFAQAEAWWDRLRTVAEVEDGVRVAGSGLVAFGSFAFAPGSADRSVLTVPRVLIGRRDGMAWVTRVVVDDEPWPSDHPAQMLARTNPRLGELDPLVETEGTVPAARWPEVVGRAVGRIEAGEVDKVVLARDVRVRHREGHAVRVAPVLERLERRYAATWTFAVDGLLGATPEMLVRLQDGRVRSRVLAGTIRRGAHPQHAAPQVSHEHPVDPRLRLVSSEKDLEEHAYAVRSVAEALAPHCTELQVPATPYVLELPDVYHLATDLTGRRADGATSLSLAAALHPSAAVCGTPTEKAAAVITELEGMDRGRYSGPVGWLDGDGDGDWCIALRCGELAPDRGSMRIFAGGGIVAASDPDAELAETEVKLTAMRHALGLLES

SEQ ID NO: 94456 - protein, 317 aa, Ornithobacterium rhinotracheale
  REGION 1..317: note = tr|A0A3R5UVC1|A0A3R5UVC1_9FLAO Isochorismate synthase OS=Ornithobacterium rhinotracheale OX=28251; GN = EQP59_08585 PE=4 SV=1
MSFILYKNPEDERLFYAELKATDTEKNGRNFIFHSFDNQTEWIFEISDQKNISKNEILSLKVDLQSENQPNYILSQSEYLDLCQNFIAELKAKNYEKLILSRVKKTPALSPTETFLKLTQKYPKAFVYLFQHEGTTWLGATPEQLVKVENNTLQTIALAGTKANAENRDWTEKEREEHQFVVDYIASALRDFKPEIGKTFTIELQNISHLKTDISAILPENFNLKQITEQLHPTPAVCGLPKDNSMAFILQNEPHERRFYTGFLGFKSANSADFYVNLRCAELFKEYTLCYVGGGLTAKSDAQSEWQETELKSLTIG

SEQ ID NO: 94457 - protein, 474 aa, Oscillatoria acuminata
  REGION 1..474: note = tr|K9THD4|K9THD4_9CYAN Isochorismate synthase family protein OS=Oscillatoria acuminata PCC 6304 OX=56110; GN = Oscil6304_1890 PE=4 SV=1
MLVVPSDTNMKPDRKDLYQFLVACQQVSVEKECPQIATLSLELPPLDPLAVLQAIAQPEDPHFYFENGNKGEAIAAIGAAITFHVPSGSARFVKAQTFIQSCLANTITTGATDLPFAGPHFFCNFTFFDDLRPPESAFPCATVLLPRWQVARCRNRSVFVANFSLSPRDNIKALHQDLCNKLTQIRWANSRWLDPVNFPNQSLQNHDFKPTANFKKSVYSALNRINNKTLNKIVLADAIDLNFPLPINLVKSLNNLRRLYPDCYTFATGNGGGTNFIGASPERLLAIYNHQLITDALAGSAPRGKTSAEDVELAKLLLSSDKEIHEHRVVIDFICDRLTRLGLTPNVPPQLLLLQLSNIQHLWTPIQATLPPGIHPLDILADLHPTPAVAGVPRDTACQEIRQYEAFDRGLYAAPLGWIDGYGNCEFIVGIRSALIEGDRARLYAGAGIVAGSDPDKELAEVQLKLKTLLKALV

SEQ ID NO: 94458 - protein, 477 aa, unidentified
  source 1..477: note = Oscillatoria nigroviridis
  REGION 1..477: note = tr|K9VQA3|K9VQA3_9CYAN Isochorismate synthase; OS = Oscillatoria nigro-viridis PCC 7112 OX=179408; GN = Osc7112_5502 PE=4 SV=1
MTVIPHRANLLQDRNQLHQFLLDCQQSLTDKDQTKIVSISQEIAPVDPLVVLQEISEPCQRHFYFEKRDPISGNSFAIAALDSTIHLTVAGTDRFTLAQNFIQSCLARTITIGTERLPFSGPHFFCSFAFFDENVATNSYFPPGLVFLPKWQITRLKDSCTIVANAIINRDLNIKIITDNIWKNFDKIASIPYKKITFLRNSSIFLKQIPVNDAAQFKTSVTSALEFIKSQYFSKIVLSQAINVISKTPFSLINSLNNLRLTYPGCYVFSTSNGQGQNFIGASPERLISVHKNELVTDALAGSAPRGKTESEDANLGKGLLNSEKDIREHLAVIDFIVDRLSSLGINPEFSPLPRLLQLSNIQHLWTPIRARIPRDIHLLKILSQLHPTPAVAGVPRDIALKQIRGCESCDRSLYAAPLGWIDRTGNGEFAVGIRSALIDGDRAILYAGAGIVAGSEPEKELAEIQLKLQALLNALV

SEQ ID NO: 94459 - protein, 482 aa, unidentified
  source 1..482: note = Oscillatoriales cyanobacterium
  REGION 1..482: note = tr|K8GJ15|K8GJ15_9CYAN Isochorismate synthase family protein OS=Oscillatoriales cyanobacterium JSC-12 OX=864702; GN = OsccyDRAFT_1574 PE=4 SV=1
MAVTQYCNQLFQNQRDVYQFLLPYQHGLIDENSSQLISLTFEIPAVDVLAIFNELAATNQLNVYFEKQEASRNYFSQSQRTAIAAIDSVLRFHTESSQRFTQIKHFIHTTLSRIVVAGNLRSLFAGPAFFCHFSFQEKTVYTRDSTFPSATCFLPKWQIVDHNQSCIVVRNLMLEPGTDLPSMVEVLWQSLQQIQAIAYDWITPPTQPLELLSKQDVGTTTAFKQSVRSALQSIQANQFNKIVLAHAVDVCSPVPFHPAHSLNNLRSLYPDCYIFSVNNGRGQSFVGASPERLVCVQNRQLVSDALAGSAPRGQTTHEDVALSHALLNSDKDNYEHQVVVDFITRQLSNLGLVPERSPLRLLQLSNIQHLHTPIRATVPASVHLLDILAALHPTPAVAGMPREITCKEICRYEPFERSLYAAPIGWINHRGDGEFAVGIRSALIDGCRARLFAGAGIVAGSDPERELSEIQLKLQALLAALV

SEQ ID NO: 94460 - protein, 425 aa, unidentified
  source 1..425: note = Otariodibacter oris
  REGION 1..425: note = tr|A0A420XHQ5|A0A420XHQ5_9PAST Isochorismate synthase MenF OS=Otariodibacter oris OX=1032623 GN=menF; PE = 3 SV=1
MSIFTELKQKLYTALTKISTAQGIIQLTAEMPLLAKDTDLLGWLKGNITYPHFFWKNRSAELTLASIGKVRQFYTLESAQQFSQQTGYDLLGGIKFECECQFILPRIVMTKTKTKLTAYLYIDTANLTEEKRQSKAVLDSLDTIQQLSAPHYQIIEHESVTDFPTWKSNIEKAIQAIRENQFSKVVLANASTLTFNQSLSAYDLLVVSQQKNLGCYHFLWSEKPESAFIGSSPEKLYQRDEQLFYTEALAGTVAVTSDPQQTERNGLWLLSDQKNVHENQLVVDNIYHHIKDSIEEIQISEAEIKRLHNVQHLRRNIQATLKKGVSDADCLMRIHPTAAVAGLPRLLAKQFIADNEGFKRNWYAGTLGYFNPTHAEFCVALRSAQIEKNQIMLYAGAGIVEGSDPESEWQEIERKSLAMASLFVK

SEQ ID NO: 94461 - protein, 451 aa, unidentified
  source 1..451: note = Paenarthrobacter nitroguajacolicus
  REGION 1..451: note = tr|A0A558GZN7|A0A558GZN7_PAENT Isochorismate synthase OS=Paenarthrobacter nitroguajacolicus OX=211146; GN = FQP90_11825 PE=4 SV=1
MTSTLRTLTVPLDVESSPGGLPSFLVRDDVLCWSRREAGLVGYGELTRFNATGPERFLEADIWWRHLILEAEITDHVELPGTGPVAFGSFAFSKTSPHVSRLILPELVVGIRDGRAWATQLTFDDRPLTEAGVLASVERWLTEPEPNGDGSAAEGSDVGLSPEVVSQDGGSGHLSHGSLSEANWMKAVADGVEEIRAGKLEKLVLARDVVATLPDGVNAAEVLRQLAARYRECWTYGVDGLVGATPEMLIQVEGRTAQARVLAGTLDRRDAEGVDDSPMAYAERVLAGSEKQRHEHEIAIDSLTRQLAPFSEAMNSHSEPFILELPNVWHLASDVKAELADIEGHVPTCLALINALHPTAAVCGTPTLVAGALIRKLEHLDRGPYAGPVGWLDAAGNGEWGIALRGAVIEDANTVRLYAGCGIVEGSQPEAELAETWAKFRPMLEALGIKR

SEQ ID NO: 94462 - protein, 449 aa, unidentified
  source 1..449: note = Paenarthrobacter ureafaciens
  REGION 1..449: note = tr|A0A444GT09|A0A444GT09_9MICC Isochorismate synthase OS=Paenarthrobacter ureafaciens OX=37931; GN = AUR_05410 PE=4 SV=1
MTSTLRTLTVPLDVDSSSGGLPSFLVRDDVLCWSRREAGLVGYGELTRFSATGPDRFLEADMWWRHLILEADITDQVELPGTGPVAFGSFAFSKTSPHVSRLILPELVVGMRDGRAWATQLTFDDAPLTEAGVLAALERWLSDASGDEPAAGGSDVGPSPEVAALNGSRGSLGRGSLSETAWMEAVTNGVEEIRAGKLEKLVLARDVVANLPEGVSAAEVLRQLAARYRECWTYGVDGLVGATPEMLIQVEGRTAQARVLAGTLDRRDAEGVEGSPMEYAERVLAGSEKQRHEHEIAIDSLTRQLAPFSEAMNSHSEPFILELPNVWHLASDVKAELADIEGHVPTCLALINALHPTAAVCGTPTQVAGALIRKLEHLDRGPYAGPVGWLDAAGNGEWGIALRGAVIEDANTVRLYAGCGIVEGSQPEAELAETWAKFRPMLEALGIRR

SEQ ID NO: 94463 - protein, 419 aa, Paenibacillus alvei
  REGION 1..419: note = tr|A0A383RCZ1|A0A383RCZ1_PAEAL Isochorismate synthase (Siderophore-specific) OS=Paenibacillus alvei; OX = 44250 GN=dhbC PE=4 SV=1
MLKCDTVPTSEGIRLLEQYQAGSSFLFSSPQGALLTHGEWARLVDWQAVDEESLPQAVSKLLDAARQGDRDCPVVVGAIPFHMEDPVCLYVPKEVHRYEPLRMDAHDYLQQETERDSYSVRAVPEPEQYKQGVNQVLERLQSGELQKVVLSRSLEVTLKHDVDVQRLLNRLLSQNTRGYTFAVPLTMEHPHASKDKGISAANGTAQTLIGASPELLVTKRGMHIKVNPLAGSAARSDDPNEDERRAAQLLRSDKDLHEHAVVIEAVVSALRPYCSKLHVPEGPSLVSTKTMWHLSTEINGELADQDISSLELALALHPTPAICGTPTEAARNLIREIEPFERGFFTGAVGWCDANGDGEWAVTIRCAEVEGRSLRLFAGAGIVVGSSAEAELAETSAKLRTLLQAMGLNEQQPMMMQGG

SEQ ID NO: 94464 - protein, 436 aa, Paenibacillus chitinolyticus
  REGION 1..436: note = tr|A0A410WZ79|A0A410WZ79_9BACL Isochorismate synthase OS=Paenibacillus chitinolyticus OX=79263; GN = PC41400_19025 PE=4 SV=1
MMLGQKEKLLSPADLLDKYSEGSAFYFGSPRRTLLAEGELVRLSVEGKGEELERLPRRVADLLAGVRAGNAAEPVIVGAIPFTVNSGVRPELFVPRHTEWAGPLADAEAVQADVAGDTARSVFDGEVDGGTFKIVSFPTESDYEAAVRKGLEQLRSGKLRKVVLSRSLRLENCPPVQTGRLLRRLAASNTRGYTFAVPLRASGSGHNPGQGQGTAPASAAHTLIGASPELLVARSGQLVTANPLAGSAARSSDPAEDKRRADALLLSAKDRHEHAVVVDAVASALRPYCRKLDVPAEPSVIGTKTMWHLSTKVTGELLEPAASSLELAVAMHPTPAVCGTPTGPARTAIRELESFDRRYFTGMVGWCDAAGDGEWAVTIRCAEIAEDAVTLYAGAGIVEGSDPAAELAETSSKLKTLLLAMGMDPDTGSGGGGKSV

SEQ ID NO: 94465 - protein, 419 aa, Paenibacillus elgii
  REGION 1..419: note = tr|A0A2T6G6J4|A0A2T6G6J4_9BACL Isochorismate synthase OS=Paenibacillus elgii OX=189691 GN=C8Z91_09565; PE = 4 SV=1
MVNLETVPAAWASELIDMYEAGSSFFLASPQRTLLAKGEAARLSVQGGADRPKSLPQHVAELLARTQFSGGAPSVVVGAIPFDPAKPAELIVPQTARWAGKLQLSSEAAERQADASDYKLHPVPEPEVYEYSVSRALARFQKGDLRKVVLGRTLHLTLPTRVDVNRLLRNLARHNPHGYTFAVNLAPGEARAAWTPDKSNGQEPRTLIGASPELLVTRTGGRLKANPLAGSAPRSSDPVEDRRRAEALLASAKDRHEHAVVIEAVADALRPYCSRLDVPREPSLVQTSTMWHLSTVVTGELADPWASSLELALALHPTPAICGTPTDLAQETIRESEPFDRGFFTGAVGWCDASGDGEWVVTIRCAEVEGRELRLFAGAGIVEGSSPQAELAETSAKFRTLLQAMGLNQPQLAVVKGDQ

SEQ ID NO: 94466 - protein, 408 aa, Paenibacillus larvae
  REGION 1..408: note = tr|V9W8G5|V9W8G5_9BACL Isochorismate synthase DhbC; OS = Paenibacillus larvae subsp. larvae DSM 25430 OX=697284; GN = dhbC PE=4 SV=1
MDHTVALEESAIKLLNEYKAGSSFFLASPYQTLLAKGTYATVSHTRLENLSELVTAVLGNAEQAGHRNPVVVGAVPFDQTNPVQLVVPEEIRWAVPLQFDSINELQHSVMSTYEIKAVPEPAEYVRGVEKGVARIKGGDLSKIVLSRSLKLSSSKTIDIPRLLRNLARQNSQGYTFAVDLPEYELDKGDISFISKTQSHRTLIGASPELLVSRSGLQVVSNPLAGSRPRSKDANEDKRRAQELLSSAKDRHEHAVVVEAVAAALRPYCRILDVPAEPSLIHTETMWHLSTEIKGELADPATSVFELAASLHPTPAVCGSPTEAARAAIREIEPFDRGFFTGMIGWCDSNGDGEWVVSIRCAEVLERSLRLFAGAGVVSESRAEDELAETSAKFRTMLLAMGLNNEQLE

SEQ ID NO: 94467 - protein, 414 aa, Paenibacillus lautus
  REGION 1..414: note = tr|A0A2A5LCR8|A0A2A5LCR8_PAELA Isochorismate synthase OS=Paenibacillus lautus OX=1401 GN=CPZ30_20590; PE = 4 SV=1
MLRYDAPTAAEAAQLMELYQVGSSFFFSSPRKTLLTHGEYSRLPISSGTGHRSLPERVGELLEFAKQAGRRDAVVVGAIPFDIQKPASLFIPLSAQWHDSLLFSEGRDPEMPRISSYKVLSVPEPTAFKEGVNRLLDLISQKKLHKAVLSRTLDITLPHALSIPQILTHLAYHHSHGYTFGVPLAPELSHTSSPDAVASTRTLFGASPELLITKKGSRIKGNPLAGSAARSADPAEDQRRAAALLSSAKDRYEHAIVIDAVASALQPYCSKLEVPAEPALVQTQAMWHLSTEINGVLKDESVTSLELALAMHPTPAICGTPTDAARDAIQEIEPFDRGFYSGAVGWSDANGDGEWAVTIRCAETEGTLLRVFAGAGIVTGSIAEAELAETSAKFRTILAAMGLNEQQTTMLEEG

SEQ ID NO: 94468 - protein, 428 aa, Paenibacillus polymyxa
  REGION 1..428: note = tr|A0A074LIE7|A0A074LIE7_PAEPO Isochorismate synthase OS=Paenibacillus polymyxa OX=1406 GN=EL23_02085; PE = 4 SV=1
MKSNTALEVQATHLLKDYKPGSSFFFASPTRTLLAQGTLGALPHGEASDTEGGLTGRVATLLESVRQSHGGHPIVVGAIPFDASRAAQLLVPAETRWAGPLHSHSTNWHSENGKAADSANAASRVNPTKLGQAPDYGIRSVPDPSEFVQGVEQALKYIASGELNKIVLSRTLQLDTSEQVDVPSYLHNLARHNTKGYTFAVDLPALEAEEAGSDGAVVGVEQRTLIGASPELLVSREGLHLTVNPLAGSAPRSDDPVEDKLRAAALLESVKDRHEHAVVVEAVALALRPLCRRLDVPQEPSLIQTETMWHLSTEITGELVDLTVSSLAVALALHPTPAVCGSPTEQAKKVIRDIESFDRGFYTGIVGWCDAAGDGEWVITIRCAEAAKHSLRLFAGAGIVAASNPEDELAETAAKFGTMLQALGLKHE

SEQ ID NO: 94469 - protein, 413 aa, unidentified
  source 1..413: note = Paenibacillus solani
  REGION 1..413: note = tr|A0A0M1P8S2|A0A0M1P8S2_9BACL Isochorismate synthase OS=Paenibacillus solani OX=1705565 GN=AM231_15695; PE = 4 SV=1
MLHYDAPTAAEAAQLMEQYQVGSSFFFSSPRKTLLTHGEYSRLPVPVGTGHRSLPERVRELLEYAKQAGRPDAVVVGAIPFDIQKPASLFIPLSAQWHDSLLFSEGAPEMPRISSYKVLSVPEPTVFKEGVNRLLDLISQNKLHKAVLSRTLDITLPHALSIPHILTHLAYHHSHGYTFAVPLAPKLSHASSPDAVASTRTLFGASPELLITKKGSRIKGNPLAGSAARSADPAEDQRRAAALLSSAKDRYEHAIVIDAVASALQPYCRKLEVPAEPSLIQTKAMWHLSTEINGVLKDESVTSMELALAMHPTPAICGTPTDAARDAIQEIEPFDRGFYSGAVGWSDANGDGEWAVTIRCAETEGTLLRVFAGAGIVTGSIAQAELAETSAKFRTILAAMGLNEQQTTMLEEE

SEQ ID NO: 94470 - protein, 410 aa, Paenibacillus sp.
  REGION 1..410: note = tr|A0A0D3VAM4|A0A0D3VAM4_9BACL Isochorismate synthase OS=Paenibacillus sp. IHBB 10380 OX=1566358; GN = UB51_13765 PE=4 SV=1
MIKHDVIPVTIATQLLDNYQSGSSFFLSSPQRTLLAQGTFLEMPTYEGTEELSSLPERVTAFLNHVKQSQHNVSVVVGAVPFDHRKPAHLIVPTTIQWGDGLHFEPTNQKEQSLTSKYEISAIPEAAEYVRGVEQGLNHLESSGLRKVVLSRTLQLTSSTMIDTHQLLVNLARNNTRGYTFAVDLPIREAEEWPLGVTPPSSPRRTLIGASPELLVSRSGLQVLANPLAGSTARSEDPEEDQQRAAALLSSAKDLYEHALVVDAVAAALRPYCNTLDVPSVPSLVQTATMWHLSTEIRGELADPSTSALTLAVALHPTPAVCGSPTEMAREVIREIEPFDRGFYAGMVGWCDSNGDGEWVVTIRCAEVDDHSLRLFAGAGVVLGSSPEGELSETTAKFRTMLIGMGLNDE

SEQ ID NO: 94471 - protein, 417 aa, Paenibacillus thiaminolyticus
  REGION 1..417: note = tr|A0A378X9H1|A0A378X9H1_PANTH Isochorismate synthase OS=Paenibacillus thiaminolyticus OX=49283 GN=dhbC; PE = 4 SV=1
MLKYDDAALAASAAELLEQYRTGTSFFFSSPERTVLARGEWARVPVQEGLDGCHRLPERVAALLAVARQAGHAIPLVAGAIPFAPAKPAQLIVPNDVQWAGPLRFDTGLLREQPVASAWEIQPIPEPDRFMDGVNEALARLGEGALQKVVLSRTLRMTAPEIVDVHQLLRNLAGHNTHGYTFAVDLAAGDDSAAEAHTGRTGPRTLIGASPELLVTKTGGRVTANPLAGSAARSDDPDEDKRRAAALLASGKDRHEHEVVIDAVVAALRPYCRALHVPAGPSLVQTKTMWHLSTNITGELADPAVSSLELAMALHPTPAICGTPTDLARAVIKDIEPFERDYYTGAVGWCDVNGDGEWAVTIRCAEAEGRTLRLFAGAGIVAGSNAASELEETSAKFRTLLLAMGVDQEQCSTVKER

SEQ ID NO: 94472 - protein, 419 aa, unidentified
  source 1..419: note = Paenibacillus tyrfis
  REGION 1..419: note = tr|A0A081P7R0|A0A081P7R0_9BACL Isochorismate synthase OS=Paenibacillus tyrfis OX=1501230 GN=ET33_33425; PE = 4 SV=1
MVNLETVPAAWASELIDMYEAGSSFFLASPQRTLLAKGEAARLSVQGGADRLKSLPQHVAELLARTQFSGGAPSVVVGAIPFDLAKPAELIVPQTVRWAGKLQLNSEAAERQSDAADYKLRPVPEPEVYEHSVSRALTRFQKGDLRKVVLGRTLHLTLPTKVDVNRLLRSLARHNPHGYTFAVNLAPGEARAAWTPDEPNGREPRTLIGASPELLVTRTGGRLKANPLAGSAPRSSDPVEDRRRAEALLASAKDRHEHAVVIEAVADALRPYCSRLDVPREPSLVQTSTMWHLSTVVTGELADPWASSLELALALHPTPAICGTPTDLARETIRESEPFDRGFFTGAVGWCDASGDGEWIVTIRCAEVEGRELRLFAGAGIVEGSSPQAELAETSAKFRTLLQAMGLNQPQPTAVRGDK

SEQ ID NO: 94473 - protein, 446 aa, Paenibacillus xylanexedens
  REGION 1..446: note = tr|A0A3N6BWB6|A0A3N6BWB6_9BACL Isochorismate synthase OS=Paenibacillus xylanexedens OX=528191; GN = EDO6_04818 PE=4 SV=1
MSKAGMVTATSAIHLLEQYREGTSFFWSSPQHTLLAQGERVRWSPLHTEHTIQSDPSDSADVMEHKYKEEIHLFIDGIQQLMDKAKQAGQSNPMVVGAIPFDPLDAAAELYVPETVKWAEPLPSESRALIQKLPAAVGCEVVEVPAGGVYEQSVDNVLVDLNQRDLHKVVLSRTLEVTSQTLVDTYQLLRNLFRDNTHGYTFAVPMRGQTQSRSTITMNKQHKAGGKIGNKTSRTFIGASPELLVTRKGINVRANPLAGSAPRSEDPAEDRRRAEELLASAKDRHEHAVVIEAVAEALRPLCRKLSVPAEPSLIQTRTMWHLSTEIHGELADAATTSLELALALHPTPAICGTPVQAARAAIKQQEPFDRGLFTGMVGWCNSEGDGEWAVTIRCAEVEGTAVKLFAGAGIVAGSTAEAELAETAAKFRTMLVAMGLDSTVSIQKGD

SEQ ID NO: 94474 - protein, 445 aa, unidentified
  source 1..445: note = Paeniglutamicibacter gangotriensis
  REGION 1..445: note = tr|A0A5B0E634|A0A5B0E634_9MICC Isochorismate synthase OS=Paeniglutamicibacter gangotriensis OX=254787; GN = FQ154_15945 PE=4 SV=1
MTSQLSAAPGTQSPGTVPLLRSITIQRPAMSEHGLLDYITRDESLVWSRHGEGTVGFGQVARFESTGAERFALARHWWDAISETADVQDPLQQPGTGLIAFGAFAFSFSSSYASRLIVPKIVVGRNETCSWITYTVADPEAELSAEAAETELAGLLEDYSPEHELGAGADKLVAGQISEQAYRDSVLKGVSVIESGAVTKLVLARDAVAELASPIAVAQVLRQLALRYNDCWTYSVDGLIGATPEMLVRVRGDFAEARVLAGTLDRATAPSDDPDYAHRMLLEDEKQRHEHQLAIDSLTEQLGPLASGMDAPDEPFVLQLPNVWHLASDVKATLATRADGSVPGVLDLAEVFHPTAAVCGTPTKEAGRILRELEGMDRGPYAGPVGWIDTRGNGEFGIALRGGVVESPTSVRLYAGCGVVAASDPAAELAESWAKMRPMREALGI

SEQ ID NO: 94475 - protein, 460 aa, unidentified
  source 1..460: note = Paenisporosarcina antarctica
  REGION 1..460: note = tr|A0A4V1AMV4|A0A4V1AMV4_9BACL Isochorismate synthase OS=Paenisporosarcina antarctica OX=417367; GN = E2636_05425 PE=4 SV=1
MIQKSITSIGYAIEDLSSGVHFYTETIEVSRLSSIAFFEAGESYKGQRFYWQNREKTFTLVGLGHAHVITSSSEDKRFEEVDKQWSELCSKIVNEEHDLQPILFGGFSFDPANQLSSEWDMFPSAYFAVPSFQLVIRDDRVFISIHLVTKEKDSQHRFDQLRSERDDLIHAAQVRELKPYAKPLLTNLEERFKELYLDAVSHVTKLIRTGEAQKVVIARSLTLTFAEDVSSPSAMYHVSKEQPESFLFGLELADNLFFGATPERLVKVENRRALSTCLAGSIKRGQTATEDQQLGNELLQDLKNLEEHQYVVDMITKVFTKYCEAVKVPKYPKLMKIRDIQHLYTPVEGQLQKGQGLLQLVKDLHPTPALGGEPRGDAMAIIRMVEQMNRGYYAAPVGWIDAAGNGEFAVAIRSALLNKQNAYLYAGGGIVADSDPTSEYAETLVKFRPMLRTLGGKLNG

SEQ ID NO: 94476 - protein, 459 aa, Paenisporosarcina sp.
  REGION 1..459: note = tr|A0A385YSV4|A0A385YSV4_9BACL Isochorismate synthase OS=Paenisporosarcina sp. K2R23-3 OX=2320858; GN = D3873_08460 PE=4 SV=1
MKEPLQELHAVPINHASEYFYIETIEVPHLSAIAFFEAGKEFKGERYYWQNRDNTKTIVGLGHLKTFTSNHSSDRFDDIQMQWNLLLQHVVQEKEDASPVLFGGFSFDPINSLPSEWSAFPTAFFAVAKFQLVIEKERSYLSIHYLGNEKDSAEVFESLRKQRDELIHSAQVKEWKVYVKHDVVKAEEILRDSYLEAVTNTRNAIRRGQLNKAVIARKLVLTMKEEVHVPSSLYFLSKEQPESYEFGLENGDSAFVGATPERLVKVEDETVFTTCLAGSIKRGTNALEDKHLGEELLADQKNLEEHQYVVKMISDVFDELCTDVKVPFGPKLMKTRDIQHLYTPIEGKPDNTSSIFQFVEKLHPTPALGGAPTEEAVKLIRVEEKMNRGYYAAPVGWVDARGNGEFVVAIRSALLQGKNAYLYAGGGIVANSTAEKEYAETIVKFRPMLRALGGNLDGI

SEQ ID NO: 94477 - protein, 357 aa, Palleronia marisminoris
  REGION 1..357: note = tr|A0A1Y5TKJ1|A0A1Y5TKJ1_9RHOB Isochorismate synthase DhbC OS=Palleronia marisminoris OX=315423 GN=dhbC; PE = 4 SV=1
MQPFRLGERAGVVRGRIVGRIEALAEAVSDSAAATFVGAIPFDRREDGFLLTPEPTGPWTPGSGDPVRRPSVRLRQVPAPEDYAAQVDALTRRIAAAGDGLRKAVIARTLEIEAPDIIDPFFVHARLNGDATMRYCLPLPPLDGAPQRWLLGATPELLLSKRQGKIASHPLAGSARRSADAVEDRAAAERLLASGKDRHEHALVVEYVLDVLAPHCSHLHAPEGPSLEATQSMWHLGTRIEGVLKDPSTPCLDLVGLLHPTPAVAGVPLAAALVAIAETETIRRGFYAGAVGWANAAGDGAWHVTLRCSEIEGRHARLFAGAGIVADSVPQGEVEETEAKFQAMLSAFDCGPLPSPN

SEQ ID NO: 94478 - protein, 468 aa, unidentified
  source 1..468: note = Paludifilum halophilum
  REGION 1..468: note = tr|A0A235B447|A0A235B447_9BACL Isochorismate synthase MenF OS=Paludifilum halophilum OX=1642702 GN=menF; PE = 3 SV=1
MSMVKQLDIRELLAQGAVRAREEDCEVLVSQVIPVKPMDPLAFFAYGAEPYAGERSFWADPNRDRILAGLGTAYRVEAEAEDRFAGVEARWRDLLRKSIREPHTHRNGTGPLLMGGFSFDPLKPKSGRWEEYADASMVLPRFLLTVAGEDCWLTVNAVIRPAEDPVSLADRLEREKQDLLSGVPATFTPMESPSFETVEVDPEAWKRSVAETAREIREGVMEKVVLARQLRVEASGRLAPASILKRLQEQQTDCFLFAVERGASCFLGASPERLVRRNGKRFLSTCLAGSIRRGSSPEEDERLGQELLSDGKNRVEHEVVVHMIREAFRTGCDAVEVPEEPVLYKAGYIQHLYTPVTGRARPGTTLLSMVKRLHPTPALGGYPQEKSVEKIREKERMDRGWYAGPVGWVDWRGDGEFAVAIRSALVKGDQAFLFAGCGIVGDSDPDSEYEEARIKFRPILSAMGGRDR

SEQ ID NO: 94479 - protein, 392 aa, Pantoea anthophila
  REGION 1..392: note = tr|A0A506P9L1|A0A506P9L1_9GAMM Isochorismate synthase OS=Pantoea anthophila OX=470931 GN=FJW00_05430; PE = 4 SV=1
MAESRAFEHPLLHDFAALCQGFLFTSPWQSLTTQGCFTTLTTPVRQGEQLTGDFQQQLQHHFTSARKQGIAHPIVAGAIPFDVAQPAALFIPESWQRFNRDDLIARASLADADLPMIRRRTALPDQARFTEMVAQAVAATRRGDLEKVVLSRLMEIVAEQPVDTAALMQRIVVQNPGSYHFHLPLPGGGALVGASPELLIRKQGRLFSSCPLAGSAARSRDPQRDRASGDSLMQSAKDRHEHQLVTDAMRATLQPRSRLLSVPETPSLLTTATLWHLATQIRGEVLDERENALSLACLLHPTPALSGFPHQRAQALIQRLEPFERQLFGGIVGWCDDHGNGEWVVTIRCGTVKGSRVRLFAGAGIVTDSQPEAEWRETGVKLDTLLRAFGLQ

SEQ ID NO: 94480 - protein, 393 aa, Pantoea dispersa
  REGION 1..393: note = tr|A0A518X9A2|A0A518X9A2_9GAMM Isochorismate synthase OS=Pantoea dispersa OX=59814 GN=D8B20_02085 PE=4; SV = 1
MVETPTFENACLQDFSALCRGFLFTSPWRSLATQGCYTTIDTPVQDAAQPQGAFQQQLRRHFADASKQGIAHPIVAGAIPFDVSQPAALFIPESHHLFHRTDLQRTLASPAEPLPQVRRRAAVPDHAGFTRMVADAVSAIRQGDPQKVVLSRLLDIVTEQPVDSAALMQRVIAQNPDSYHFHLPLPEGGALVGASPELLVRKQGRDFHTCPLAGSARRHPQDVQQDRAAGEALMQSAKDRHEHQLVTDAMRATLQPRSRLLSVPAVPSLLTTATLWHLATQIQGDVLDARENALSLACLLHPTPALSGFPHARACQLIQQLEPFDRRLFGGIVGWCDSEGNGEWVVTIRCGTVQGNRVRLFAGAGIVADSHPESEWRETGVKLDTMLRAFGLQ

SEQ ID NO: 94481 - protein, 431 aa, unidentified
  source 1..431: note = Pantoea sesami
  REGION 1..431: note = tr|A0A1M5W4V8|A0A1M5W4V8_9GAMM Isochorismate synthase MenF OS=Pantoea sesami OX=1881110 GN=menF PE=3; SV = 1
MNSIFLALEQLRTQLSQALPAAPGIRHFDVSFPLNDAFDPLAWLGEQQCYPQFYWQQRNGDEELAALGAVNQFSSLALASQFLREQNAAQDTRVCGLNAFNPEQGSLFLPRLLWRRTAGNATLRLQLWSDRSLVEDARVAQDFLQRLRPARSIRPLSVHVEHETHQPQQAEWLKLIRRATETIARGDFEKVVLARATDLQFTQRVNPVALMAASRALNLHCYHFCMVFDARNAFLGSTPERLWRRRGKLLRTEALAGTVASHTDDSQAQRLGEWLLNDDKNQRENMLVVEDICQRLQHSTQTLEVLPPQVVRLRKVQHLRRCIWTELKQADDEQCLLMLQPTAAVAGLPRQPAREFIQKVEPFNREWYAGSAGYLSPEQSEFCVALRSARVQEDSLRLYAGAGIVSGSDPEQEWLEIENKAAGLRSLLLRD

SEQ ID NO: 94482 - protein, 393 aa, Pantoea sp.
  REGION 1..393: note = tr|A0A4S3L9H2|A0A4S3L9H2_9GAMM Isochorismate synthase OS=Pantoea sp. R102 OX=2507583 GN=ERD80_18430; PE = 4 SV=1
MVESSTFENAWLKDFSALCRGFLFTSPWRSLATQGCYTTINTPVGDAALLQGDFQQQLRQHFAAAKKQGIANPLLVGAIPFDVSQPASLFIPESWQSFNRADLQQALPAQQSDLPAVRRRTAVPDHAVFTRMVADAVTTIQRGDPDKVVLSRLMDIVTEQPVDTAALMQRVIAQNPNSYHFHLPLAEGGALVGASPELMLRKQGRDFSSCPLAGSARRHHDDASADRVAGNTLMASAKDRHEHQLVTDAMRSTLQPRSRLLSVPTVPSLITTATLWHLATQIDGEVQDERENALSLAALLHPTPALSGFPHARAQQLIQQLEPFDRQLFGGIVGWCDSEGNGEWVVTIRCGTVNGTRVRLFAGAGIVADSQPESEWRETGVKLDTMLRAFGLQ

SEQ ID NO: 94483 - protein, 392 aa, Pantoea vagans
  REGION 1..392: note = tr|E1SC65|E1SC65_PANVC Isochorismate synthase EntC; OS = Pantoea vagans (strain C9-1) OX=712898 GN=entC PE=4 SV=1
MVESLAFEHPLLQDFPALCRGFLFTSPWRSLTTQGCFTTLTAPVNQGEQLTGEFQQQLQHHFASARKQGIAHPILVGAIPFDVDQPAALFIPESYQTFQRDDLKAHASLAESNLPKVRRRTALPDHATFTDMVAQAVTATQRGDPDKVVLSRLMEIVAEQPVDTAALMQRILAQNPDSYHFHLPLPDGGALVGASPELMIRKQGRQFSSCPLAGSAPRNSDPQRDQASGDSLMRSAKDRHEHKLVTDAMRMTLQPRSRLLSVPEIPSLLTTPTLWHLATQIRGEVLDDRENALSLACLLHPTPALSGFPHQRAQALIQQLEPFERQLFGGIVGWCDDQGNGEWVVTIRCGTVNGPRVRLFAGAGIVADSQPESEWRETGVKLDTMLRAFGLH

SEQ ID NO: 94484 - protein, 366 aa, unidentified
  source 1..366: note = Parabacteroides acidifaciens
  REGION 1..366: note = tr|A0A3D8HJI5|A0A3D8HJI5_9BACT Isochorismate synthase OS=Parabacteroides acidifaciens OX=2290935; GN = DWU89_00505 PE=4 SV=1
MTPDEISTCHIIDALINENRSFALWRIPGESPRFAMQTSGSARLLYNIEELDGQSGFVIAPFHVSEQHPIVLIRPDTTVVPSAWHNRANTMTQPCHRHGTTVPTVGNDKEDYAYRFNLFIEPLRKKAFDKLVLSRHQVVDGQPLSFSPAATFYEAIKRYRYSYVYLCHTPATGTWLGCTPEIILSGEKGEWHTVALAGTQPLQDGELPTEWDDKNREEQEYVAFYIRKQLHALGIKPEESAPSPVRAGELAHLKSDFSFPLPDNRKLGDLLKRLHPTPAVCGLPKEEAYRFIRENEGYDRSYYSGFIGLLAPEGRSDLYVNLRCMNILANTLVLYAGGGILASSEPESEWLETEAKMQTMKRLLEI

SEQ ID NO: 94485 - protein, 365 aa, Parabacteroides distasonis
  REGION 1..365: note = tr|A0A173RKI9|A0A173RKI9_9BACT Isochorismate synthase entC OS=Parabacteroides distasonis OX=823 GN=entC; PE = 4 SV=1
MIPRDFYEIIDTLIKQGRSFAIWRIPGEDRLHFRMQSAGSPCLLYDIKDLNERSGFVIAPFQVTAERPIVLIQPDCFEIPSESDRDFSREKNEFPSNEIEIPSESEEKERYAYHFSLFTNPLLKGSQDKLVLSRSKTIRKDPSFSPGKAFFAAVERYIRSYVYLCHTPETGTWMGGTPEILLSGEKGDWQTVALAGTQSLRDGKLPKSWDHKNWREQQLVASYIRRQLSTLGITPEEKGPYSARAGEVSHLKSDFFFSLPDSEKLGDVLQLLHPTPAVCGLPKEEAYHFIIEHEGYDRSYYSGFIGWLDPKGKTDLYVNLRCMNILPKTFTLYAGGGLLAASQLEDEWQETEDKLDTMRRIVGNL

SEQ ID NO: 94486 - protein, 376 aa, Parabacteroides johnsonii
  REGION 1..376: note = tr|B7B9M5|B7B9M5_9BACT Isochorismate synthase; OS = Parabacteroides johnsonii DSM 18315 OX=537006; GN = PRABACTJOHN_01728 PE=4 SV=1
MTPDELRICNVVDTLIKKNRSFALWRIPGESPRFAMQTSGSARLLYHIEELDEQSGFVIAPFHVSKQHPIVLIRPDIQELPSDEEIKVSCLWNKSSMPTEQEFHHSETLVSYPENPKEDYNRRFNTFIEPLHRKQFEKLVLSRSQTIPAGKTDFSPAAAFHKAIERYKYSYVYLYHTPETGTWLGCTPEIILSGEKGEWHTVALAGTQPLQNGELPTEWDDKNREEQEYVAFYIRKQLQALGIKPTETPPAPVRAGELSHLKSDFSFPLPDNKKLGELLKRLHPTPAVCGLPKEETYRFIRENEGYDRSYYSGFIGWLAPEEKSDLYVNLRCMNILPGSFVLYAGGGILASSETESEWLETEAKMQTMKRLVSIDN

SEQ ID NO: 94487 - protein, 372 aa, Parabacteroides merdae
  REGION 1..372: note = tr|A0A414L6K8|A0A414L6K8_9BACT Isochorismate synthase OS=Parabacteroides merdae OX=46503 GN=DW705_16645; PE = 4 SV=1
MTPDELRICNVVDTLIRKNRSFALWRIPGESPRFAMQTSGSARILYHIEELDEQSGFVIAPFHVSKQHPIVLVRPDIQKLPPDEETKVSYLMPAEQEFHHSETLVSFLENPKEDYSRRFNAFIEPLRRKQFEKLVLSRCQTIPADRANFSPAAAFHKAIRRYKYSYVYLCHTPKTGTWLGCTPEIILSGEKGKWHTVALAGTQPLQNGELPIEWDDKNREEQEYVAFYIRKQLQALGIKPTETPPIPVRAGELSHLRSDFSFPLPDNKKLGELLKRLHPTPAVCGLPKEETYRFIRENEGYDRSYYSGFIGWLAPEGKSDLYVNLRCMNILPGSFVLYAGGGILASSETESEWLETEAKMQTMKRLINSTDN

SEQ ID NO: 94488 - protein, 365 aa, Parabacteroides sp.
  REGION 1..365: note = tr|A0A3E4PC14|A0A3E4PC14_9BACT Isochorismate synthase OS=Parabacteroides sp. 20_3 OX=469591; GN = DXC95_07435 PE=4 SV=1
MIPRDSYEIIDTLIKQGRSFAIWRIPGEDRLHFRMQSAGSPCLLYDIKDLNERSGFVIAPFQVTAERPIVLIQPDCFEIPSESDWDFSREKNEFPSNEIEIPSESEEKERYAYHFSLFTNPLLKGSQDKLVLSRSKTIWKDPSFSPGKAFFAAEERYIRSYVYLCHTPETGTWMGGTPEILLSGEKGDWQTVALAGTQSLRDGKLPKSWDHKNWREQQLVASYIRRQLSTLGITPEEKGPYSARAGEVSHLKSDFFFSLPNPEKLGDVLQLLHPTPAVCGLPKEEAYHFIIENEGYDRSYYSGFIGWLDPKGKTDLYVNLRCMNILPQTFTLYAGGGLLAASQLEDEWQETEDKLDTMRRIVGNL

SEQ ID NO: 94489 - protein, 347 aa, Parachlamydia acanthamoebae
  REGION 1..347: note = tr|F8L162|F8L162_PARAV Salicylate biosynthesis isochorismate synthase OS=Parachlamydia acanthamoebae (strain UV7) OX=765952 GN=pchA PE=4 SV=1
MGFDQCDAFLKNGTIMSNENGNFLLGYGARTWLSSPCSSSPCFYFPDFFLELASPWFKHAYWEERSYEELKEFLEPIESTISEWQNRDQTYFMNGFEDLKNKFQQGKMEKAVPYAFEFSNSTMTREKLQRSLNRLLHYSHAQPVNVYGFWDQHSGILGATPEVLFKMQRQEKNMLYTHACAGTRGRSDIDNLFDCKELHEHDVVVQGIVESLSSLGKIHIGELKALHLPFLSHLITPIEVELDVSEDFEKIVRRLHPTPALGGFPKNESLEWIKNYKTTVERGRFGAPAGYIYANVANCFVSIRNVQWNAEQMMIGAGCGVVAESQMRNEWNEINLKMQSIKEMLGI

SEQ ID NO: 94490 - protein, 401 aa, Paracoccus pantotrophus
  REGION 1..401: note = tr|A0A1I5HJQ7|A0A1I5HJQ7_PARPN Isochorismate synthase OS=Paracoccus pantotrophus OX=82367 GN=BDE18_0548; PE = 4 SV=1
MNIRLSEAPRKTASPVPDPVLFGFDGPSGRIQGRGPARRIAAGNAATLEARVAAALAGVAPDAVIGGALPFDREAGDCLWHCRRSEASAPGGAALQGLPLPGWRLTAEPAARDYAGAVARALGIMAEEAGSRDALEKIVLARTLLVESAAPIPVEALMARLHADRSVTAFRVALPAGPEHPQGRALCGATPELLVEKRGRTIASHPLAGSARRLADPVADHAAAAALSGSAKDHREHALVVEAILDTLAPWCRELGCPQGTCVTSTRSMWHLGTRIEGRLKDADTPSVVLASALHPTPAVCGVPMGRAAGFIKALEPVARDFYAGAVGWCDASGDGAWYVAIRCAEISGRQARLYAGAGIVPGSDPMAEAAETGAKFGALLAALGLPQDAALQGVACNGDT

SEQ ID NO: 94491 - protein, 401 aa, unidentified
  source 1..401: note = Paracoccus siganidrum
  REGION 1..401: note = tr|A0A418ZUJ6|A0A418ZUJ6_9RHOB Isochorismate synthase OS=Paracoccus siganidrum OX=1276757; GN = D3P05_21200 PE=4 SV=1
MNIRPDDNGQHGAQPDAADCLFSFDGPGGAIAGHGPARAIERGPAATLEDRLARAMGNEAARQGAVIGGALPFDKQDHDCLWQAVSLSFAPARAGGAGPEAEPALPAIRALRPEPPATDFADAVARALRIMGEEAGGPDALAKIVLSRSLAIEAESPLPLPAILSRLARDRSVTTFRTRLPGGPDHALVGATPELLLRKSGDRIASHPLAGSARRSPDPAQDRAAAEALSRSDKDRREHRLVVEYILDLLAPFCRDLTCPEGTRLTHTRGMWHLGTRIEGQLNDDTIPAVLLAAGLHPTPAVCGLPVARAAALIRALEPVPRGFYAGAAGWCDARGDGAWFVAIRCAEIRGAFARLHAGAGIVPGSAPMAEAAETGAKFGALLAALGLPRDAGMAGVDMPG

SEQ ID NO: 94492 - protein, 402 aa, Paracoccus sp.
  REGION 1..402: note = tr|A0A3N7GJC1|A0A3N7GJC1_9RHOB Isochorismate synthase OS=Paracoccus sp. BP8 OX=2305219 GN=D1H97_07905; PE = 4 SV=1
MNIRLSEAPEKAASPVPDPVLFGFDGPSGRILGRGAARRVAPGNAATLEARVAAALAAAAPGEMIGGALPFDREAADCLWQCRRGEAPAPTGIAPPGLPLPDWHLAAEPAAGDYAGAVARALGIMAEEAGSRHALEKIVLARTLLVESAVPIPVEALMARLRADRSVTAFRVALPAGPDHPQGRTLCGATPELLVEKRGRSIASHPLAGSARRLADPVADRAAAEALAGSGKDHREHALVVESILDTLAPWCRELGCPEGTRVTSTRSMWHLGTRIEGRLKDEGTPSVVLASALHPTPAVCGVPMARAAGFIKALEPVARDFYAGAVGWCEAGGDGAWYVAIRCAEISGRRARLYAGAGIVPGSDPMAEAAETGAKFGAFLAALGLPQDAGLAGVARKDGEN

SEQ ID NO: 94493 - protein, 401 aa, Paracoccus versutus
  REGION 1..401: note = tr|A0A369U2W2|A0A369U2W2_PARVE Isochorismate synthase OS=Paracoccus versutus OX=34007 GN=DVR11_08650; PE = 4 SV=1
MNIRLSEAPSKTASPVPDPVLFGFDGPSGRILGRGPARRIAAGSAATLETRVAAALAGAAPDEMIGGALPFDREAGDCLWQCRRSDAPAPGGAAPQGLPLPDWRLTAEPAARDYAGAVARALGIMAEEAGGRDALEKIVLARTLLVESTAPIPVEALMARLHADRSVTAFRVALPAGPEHPQGRALCGATPELLVEKRGRRIASHPLAGSARRLADAAADRAAAQVLSGSAKDHREHALVVESILDILAPYCRELGCPEGTCITSTRSMWHLGTRIEGRLKDEDTPSVVLASALHPTPAVCGVPMARAAGFIKALEPVARDFYAGAVGWCDASGDGAWHVAIRCAEISGRRARLYAGAGIVPGSDPMAEAAETGAKFGALLAALGLPQDAALQGVPCNGET

SEQ ID NO: 94494 - protein, 404 aa, Paracoccus yeei
  REGION 1..404: note = tr|A0A386UHR0|A0A386UHR0_9RHOB Isochorismate synthase OS=Paracoccus yeei OX=147645 GN=PY32053_00493; PE = 4 SV=1
MNIRMSEAPEILAPLDDDPVLFAFQGPHGRVQGRGAPVQVPRGGADTVAARVGQALSGALPGAMIGGALPFDRTQADCLWLCNRAAPQPAAAARPAAAVPGAEQRPDWRLTAEPEPAAYARAVARALAIMQDEAGRVGALEKIVLARSLRAESGAPIAVEALMERLAQDASVTAFRVALPPRGRQTRQLCGATPELLLSKTGALIASHPLAGSARRLADPEADRAAAQVLARSDKDQREHALVVESILDVLSPWCRSLSAPEGTQLTTTRSMWHLGTRIEGMLKDPEMPSVVLAALLHPTPAVCGVPMARANALIHDLEPVPRDFYAGAVGWCDARGDGAWYVAIRCAEIAGATARLYAGAGIVPGSDPMAEAAETGAKFGAFLAALGLPPDAGLAGLAPNEVE

SEQ ID NO: 94495 - protein, 459 aa, unidentified
  source 1..459: note = Parageobacillus caldoxylosilyticus
  REGION 1..459: note = tr|A0A150M589|A0A150M589_9BACI Isochorismate synthase MenF OS=Parageobacillus caldoxylosilyticus; OX = 81408 GN=menF PE=3 SV=1
MAILYQHKIRERLHLIEKRTKRPFISWTEELNDVDPVYFFSLGPICSFRERFFWGDRTNETVYVGLGCTYVIETEEKEERFHTVETQWKQWVEQTDHYSNGIKMGPILFGGFSFDPYKPHTEKWRAFPHAKMLVPAVLLASKGGKATLTVTVRSGQSEETMEKIETLFRLLHEGRAPIHSLPSVRKYEEKQTEQWFDAVKQTIANIHSGKFDKVVLAREARLSFADRVEASVVLRQLREQQPFSYLFAFEQEGQCFIGASPEQLVKKEGDACYSTCLAGSIRRGKTVQEDEQLGEWLLHDEKNLHEHHFVVQMIKEAMEAVCERVYMPPSPQLLKLPNIQHLYTPVIGEHCRASSILSMVAKMHPTPALGGTPREAAVKEIREVEPLDRGWYAGPIGWMDTEGNGEFAVAIRSGLLQGQEVSIFAGCGIVGDSDPISEYEETKVKFIPMLSALGVGQDE

SEQ ID NO: 94496 - protein, 459 aa, unidentified
  source 1..459: note = Parageobacillus genomosp.
  REGION 1..459: note = tr|A0A023CM86|A0A023CM86_9BACI Isochorismate synthase MenF OS=Parageobacillus genomosp. 1 OX=1295642; GN = menF PE=3 SV=1
MAILHQHKIREQLHLIEKKAKRLFISWTEELNDVDPVYFFSLGPKCSFRERFFWMDRTSETIYVGLGCTYVIETAEKEERFHTVETKWKQWIEQSAFYSNGTKTVPILFGGFSFDPYKPRTEKWRAFPHAKMVVPAVLLASKGGKATLTVTVRSGQSAETVEKIETLLHLLHEGQASIHSLPSLIKYEEIQTEQWLDTVKQMIAKIHSGKFDKVVLAREARLSFANRVEASAVLQQLREQQPFSYLFAFEQEGQCFIGASPEQLVKKEGDVCYSTCLAGSIRRGKTVQEDEQLGEWLLNDEKNLHEHHFVVQMIKEAMEAVCERVHMPPSPQLLKLPNIQHLYTPVVGEHCRASSILSMIAKMHPTPALGGTPREAAVKEIREVEPLDRGWYAGPIGWMDAEGNGEFAVAIRSGLLQGQDVSIFAGCGIVGDSDPISEYEETKVKFTPMLSALGVGQDE

SEQ ID NO: 94497 - protein, 460 aa, unidentified
  source 1..460: note = Parageobacillus thermantarcticus
  REGION 1..460: note = tr|A0A1I0SK44|A0A1I0SK44_9BACI Isochorismate synthase MenF OS=Parageobacillus thermantarcticus; OX = 186116 GN=menF PE=3 SV=1
MAILYQHKIEEQLRFIGKKTNRPFISWSGEMDRVDPVYFFALGQACSFRERFYWSDRANETVYVGLGCTYSIETEEKEQRFHSVETQWKRWMEEIASYHNGTDATPILFGGFSFDPHKPKTDKWRAFPHAKMVVPTVLLSLKNKKATLTVTVPSECHEEVIEKIGMLMRLLSQEQRQPTSSLPKLVKYEEIQKEEWIHAVEKTIGNIRKGKLDKVVLAREARLSFADTIDPSAVLWRLREQQPFSYLFAFEQEGQCFIGASPEQLVKKEGDACYSVCLAGSIRRGKTFQEDEQLGQWLMHDEKNLREHQFVVQMIKEAIEAVCEHVDMPASPQLLKLQHIQHLYTPVIGEKCHAASVLSIVEQMHPTPALGGTPREKAMKEIREIEPLDRGWYAAPIGWMDAEGNGEFAVAIRSGLLSGKEAFIFAGCGVVGDSDPISEYEETKVKFTPMLSALGVERNE

SEQ ID NO: 94498 - protein, 460 aa, unidentified
  source 1..460: note = Parageobacillus thermoglucosidasius
  REGION 1..460: note = tr|A0A178U3A8|A0A178U3A8_PARTM Isochorismate synthase MenF OS=Parageobacillus thermoglucosidasius; OX = 1426 GN=menF PE=3 SV=1
MAILYQHEIEEQLRFIGKKANCPFISWSGEMDDVDPVYFFALGQACSFRERFYWSDRANGTVYVGLGCTYSIETEEKEQRFRIVETKWKKWMEQLAFDHHGTAATPILFGGFSFDPFKPRTEKWRAFPHAKMVVPTVLLSLKNGKATLTVTVPSMRYEESMEKIGLLLRLLSQEQKQPTASLPTLVKYEEAQKDEWIHAVEKTIRNIREGKFDKVVLAREARLSFADVIDPVVVLQQLREQQPFSYLFAFEQDGQCFIGASPEQLVKKEGDACYSICLAGSIRRGKTLQEDKQLGQWLMRDEKNLREHQFVVQMMKEAMGSVCKRVQIPASPQLLKLQHIQHLYTPVIGEKCHAASVLSIVEQMHPTPALGGTPREKAIKEIRETEPLDRGWYAAPIGWMDAEGNGEFAVAIRSGLFQGKEAFIFAGCGVVGDSDPMSEYEETKVKLTPMLSALGVERDE

SEQ ID NO: 94499 - protein, 462 aa, unidentified
  source 1..462: note = Parageobacillus toebii
  REGION 1..462: note = tr|A0A150N5H7|A0A150N5H7_9BACI Isochorismate synthase MenF OS=Parageobacillus toebii OX=153151 GN=menF; PE = 3 SV=1
MAILYQHKIQEQLHFIGKKANRPFISWSEEIDHVEPVYFFALGQACSFRQRFYWSDRTNETIYVGLGCTYIIETEEKEQRFRTVETKWNRWMAQTASYSNGTDATPIIFGGFSFDPFKPRTEKWRSFPHAKMIVPTVLLSIKKGKATLTVTMRSEQNEEMMEKIGVLIRLLYQGQEQRQTTSSLPPLITYKEVQKEEWIDAVKKTIENIRKGKFDKVVLAREARLSFADAIDPSVVLQQLLEQQPFSYIFAFEQEGQCFIGASPEQLVKKEKDTCYSICLAGSIRRGKTLQEDEQLGKWLMNDEKNLREHQFVVQMIKEAIEAVCKRVQIPSSPQLLKLQHIQHLYTPVIGEKCRAASVLSIVEQMHPTPALGGTPREKAIKEIREAEPLDRGWYAAPIGWMDAEGNGEFAVAIRSGLLQGKEASIFAGCGVVGDSDPMSEYEETKVKFTPMLSALGVERDE

SEQ ID NO: 94500 - protein, 464 aa, Paraliobacillus ryukyuensis
  REGION 1..464: note = tr|A0A366E729|A0A366E729_9BACI Isochorismate synthase MenF OS=Paraliobacillus ryukyuensis OX=200904; GN = menF PE=3 SV=1
MIETTQKPLDILIDKAMKTAKNQQIEQIISLTEKINDVDPFTFFDQAKVLGDNRFFWSSATDDFYLVGAGEAYTLQANTNAYYQIEQQWKHVLDRAFIHNSYRQPGTGFVAFGGFPFDPTESLSQVWDDFDGSHFRIPSYLLARHNGEFFLTMNIVVSPQDKKADLLEQIEQQKVILLSNTAAIQAQAKIAFTEEVYPMEWKETVKKATEEIKQGKAAKIVLARAMNLHFDSLPVIQSVLKELMRVQTRSFIFAYEQGDSCFIGATPERLVRVEQEQVFSACLAGTAPRGKTTGEDQHIADHLLHDRKNREEHDYVVEMIEHALTDACESVYVPDQPVIYPLKNLQHLYTPVTAKLKKDYSILDIVKNLHPTPALGGLPREASLSFIRSFEALERGWYGAPIGWFDANQNGEFGVAIRSGLLKGKTATLFAGCGVVKDSDPDAEYQETVMKFAPMRSALRGENT

SEQ ID NO: 94501 - protein, 459 aa, unidentified
  source 1..459: note = Parendozoicomonas haliclonae
  REGION 1..459: note = tr|A0A1X7APZ7|A0A1X7APZ7_9GAMM Isochorismate synthase MenF OS=Parendozoicomonas haliclonae OX=1960125; GN = menF PE=3 SV=1
MNPVNSQRPDALKQAIDSLTHSLSLAQPTSQWQRISVPVVGHEMGEVQFLPLLAGGAGLRLYWANRDNTLEVAVFGSALSFKQNTTDALSECQSALADVFQDMPSARVYGGLAFSSREDDHWPGFGGGELVLPEIELVRDQAGLTLSCHFIFDGSLSSVQHQQRLIDSLQSLHCADRFPTELPQAEITDEHPGWDYWQSCAAQALDALEEGRVAKVVLSREQTLALNGPLCPWTMLSALQSLNPNTYRFAFCQADGAVFFGASPECLYQRTENQLHSEALAGTTARNGDPVQDRRLAAALLTDDKNRRENALVMRSIQEALAQCSETVDTERDIELIRLKSVQHLRQRINARLNPETTDAQLLGLLHPTPAVGGLPKAEAHELIAELEDYPRGWYAGPFGTLHAQGAEFAVALRSARLEGQTLKLYSGAGLVPGSNINAEWAELDSKLRTIQSILDIEL

SEQ ID NO: 94502 - protein, 414 aa, unidentified
  source 1..414: note = Parvibacter caecicola
  REGION 1..414: note = tr|A0A4T9T6M2|A0A4T9T6M2_9ACTN Isochorismate synthase OS=Parvibacter caecicola OX=747645 GN=E5982_07955; PE = 4 SV=1
MTRIYSYTQAIDADIVDAFCLLQKGFTDQFVYYRKEAPVRFMGLGRCVALPTLDEAEITLEGPVHAQPVFFSFNRFDGANPALADELFSSFPRLRLMLPEVVLIENERGTFLQVNSLGPVYAGRVQRFSRDCERAPERSAAPIPYQLEMDSREQWQEAMAQAGEALSEGRVRKVVLSRRLRLQAGHPFSSKDVLVNLIDGDAVGTVLLYRYADVFFCGCTPELLVRKNGCTVESMCLAGTCPAGADGEESAVLARQLMADRKNREEHQFVVDFIRTVFERTCYNVEIPAEPRIMRLAHVQHLFTPVKAQVLEGVSLWQLAEDLHPTPATAGAPVGEATMLIRRIEPYNRGFYAGACGYVDGAGDGEFSVALRTGVFDGEMGYVYGGCGIVEESDAQAEYEEINLKLRTILSAFG

SEQ ID NO: 94503 - protein, 424 aa, Pasteurella aerogenes
  REGION 1..424: note = tr|A0A448K4K6|A0A448K4K6_PASAE Isochorismate synthase MenF OS=Pasteurella aerogenes OX=749 GN=menF PE=3; SV = 1
MDSFHFLKKQLIEKINAYQPQREEITVLQSQSEVEVNLLSWLKAQNAYPQFYLKRRDEAQTFAALGKVRSFSDTNLAQQFIEAHDLTLIGGLTFDGETLLYLPRLLLLQEKDQLTVLLFIDNRVDWATEKAQLLPLLETFVKTTALLPIQQSIYQHSPTASQAQWCQWVENALQHIQQGHAGKIVLANETLFHTKQPLCAKEVLAESEQYNVGCYHFLLARDAECSFIGSTPERLYQRDGDQLQTEALAGTAFMSEDEQLNRQQATWLLHDPKNIYENSLVVEDIQQNLRPFSTQIEVSELGIKQLRQVQHLRRQISAKLAENCGDSVCLQAIHPTAAVAGLPRQAAKQFLQQTETFQRSWYAGTLGFMRQQQAEFCVTIRSAFIEQNKIRVFAGAGIVEGSIPLLEWQEIERKALGLISLLQE

SEQ ID NO: 94504 - protein, 434 aa, Pasteurella bettyae
  REGION 1..434: note = tr|I3D6I6|I3D6I6_9PAST Isochorismate synthase MenF; OS = Pasteurella bettyae CCUG 2042 OX=1095749 GN=menF PE=3; SV = 1
MDSLHSLQQQLMQQIDAHQPLDLKQDVVVFTAQVKAELNLLAWLKAQSDYPQFYLNSRVDSLSDNQHCLAAVGKVRSFSDINSAQAFIHNHALILVGGITFNGQSDFYVPRILLQQKDHQLIASLCIDNRLNWHNEKQSAVKCLEIFAKNTALLPLRQSVKLVSQRANQQQWCEWVEQALAEIQKGTFNKAVLANESLFESEDVIDAIDLLAESESKNTGCYHFLFAEQANSVFIGSSPERLYLRDGCDLKTEALAGTASMTENAEQNQKFGEWLLNDKKNEYENRLVVDDICGNIQAFTTQIEVQPIELKRLRVVQHLRRKIFAKLTALNGDEVCLKAIHPTAAVAGLPKQAALAFLKQIEIFDRSWYAGTLGFMSQVKSEFCVTLRSAFVEQNRIRIFAGAGIVAGSIPLLEWQEIERKASGLLSLLQSSGE

SEQ ID NO: 94505 - protein, 430 aa, unidentified
  source 1..430: note = Pasteurella caecimuris
  REGION 1..430: note = tr|A0A4S2E5P5|A0A4S2E5P5_9PAST Isochorismate synthase MenF OS=Pasteurella caecimuris OX=1796644 GN=menF; PE = 3 SV=1
MDSLEQATSQLSRQIEDYLRQKQSDIVCFQTDITNVNLLAWLKAQSIYPQFYLHFRDENKSLAAVGQVRSFSQLNLAQTFIEEYNFPIIGGLQFQGSGQFILPQLLLEENGNGTTISCFVEGKTSAQNTLTILKTLPKTTALCVLTKQPPLHTEQRANKRIWCDWVNQALYEIKQGGLIKLVLANETVFHLKQAINPYDFLAESQNQNQGCYHFLWAEKPYSTFVGSTPERLFAREYNLFLTEALAGTAPITADPKENQQQAEWLLNDEKNLNENWLVVQDISQNIHPMVESFDISEVELKPLRKVQHLLRKIRANLTAHYRDSVLLQAIHPTAAVSGLPQQQAKMILSEIETFERGWYAGTLGLMSKAYSEFCVAIRSAFIEGNQIRVFAGAGIVEGSEPLTEWQEIERKAEGLISLFAENNNGEKECL

SEQ ID NO: 94506 - protein, 432 aa, Pasteurella canis
  REGION 1..432: note = tr|A0A379ESA1|A0A379ESA1_9PAST Isochorismate synthase MenF OS=Pasteurella canis OX=753 GN=menF PE=3 SV=1
MDNLQTIKAQLITLINAYQPSENQEIALFQVQSMTSFPLLSWLKSQHNYPQFYLKIRDGSSTWASIGKVRSFSDVALAEQFVQTHDLSLVGGLQFYGETLFVLPRILLQQTQTSLTVTLFIDTQDFVQDKQRALDSLETFTKQSVLKPIQQPIQLLSQKANQAEWCHWVELGLQKIQQSELSKIVLANESCFKASTQLNPNDFLAESEKYNLGCYHFLFAESEKHAFIGSTPELLYRRQGLHLKTEALAGTAFMGDDLEQNQQQSDWLLHDKKNEYENKLVVDGICQNLHPFVQQIVVDDVELKKLRKVQHLRRKISAKLKAGCGDKDILLAMHPTAAVAGLPQLEAKQALRNLENFDRTWYAGTLGFMNASQADFCVTIRSAFIEQMENYSQLCVFAGAGIVEGSVPLLEWREIERKAAGLVSLLQQNHDK

SEQ ID NO: 94507 - protein, 432 aa, Pasteurella dagmatis
  REGION 1..432: note = tr|C9PQ52|C9PQ52_9PAST Isochorismate synthase MenF; OS = Pasteurella dagmatis ATCC 43325 OX=667128 GN=menF PE=3; SV = 1
MDNLQLIKAKLIEQLEAYQPNGQDDIAVFEYQMNTDIVLLSWLKSQQVYPQFYLNIRNNSAKWACVGKVRSFSEVSQAQQFVEKYDLPLVGGLQFYGKTLFILPRLLLQQTQTGIFVSLYLNAKHFVEEKAQALACLDTFEKLTALNEIKQSIKLISQKANQAQWCEWVELGLAKIKQGELSKIVLANENCFETSNLLNEKDFLAQSERYNLGCYHFLFAEEPNKAFIGSSPELLYRRQGNLLKTEALAGTAFMSDDEEQNQQQSDWLLHDPKNEYENRLVVDGICQNLEPFVQHIEVEKVELKKLRKVQHLRRKISAVLNPDCGDTQLLHAMHPTAAIAGLPQLEAKQALRKLENFDRAWYAGTLGFMSKMQADFCVTIRSAFIEQMDNQSKLCVFAGAGIVEGSIPLLEWREIERKAIGLVSLLQQNKSE

SEQ ID NO: 94508 - protein, 422 aa, Pasteurella langaaensis
  REGION 1..422: note = tr|A0A2U0SL56|A0A2U0SL56_9PAST Isochorismate synthase MenF OS=Pasteurella langaaensis DSM 22999; OX = 1122935 GN=menF PE=3 SV=1
MFESLAEKVKSHQVNPQSPMISVFQLEIAEFGDLLAWMKGQDTFPQYYLNFRDSVRKIAAIGKVRSFSDEISAQHFVASQDLTLVGGMTFAKQGHFWLPRLMIEQNAQGVRISVYMDNQADGAQEKREALNALKTLQHFTALEPLKQQVKLVSQKANQAQWCSWVERALIAIQQNKLTKVVLANESQFESAQPINAKDFLAESEKQNTGCYHFLYAENADCTFVGSTPERLFKRQGPQVKTEALAGTALMSDDEQQNQQQAAWLLQDRKNDEENLFVVKDICDNLQNVVTQVNVGKVELKQLRRVQHLRRQIEATLKPEFSDAACLQAIHPTAAVSGLPQQKAIAFLQNSENFDRTWYAGTLGVMSKQQGEFCVTIRCAFIEQNKIRIFAGAGIVEGSVPLLEWQEIERKASGLLTLLSSGE

SEQ ID NO: 94509 - protein, 431 aa, Pasteurella multocida
  REGION 1..431: note = sp|Q9CPI5|MENF_PASMU Isochorismate synthase MenF; OS = Pasteurella multocida (strain Pm70) OX=272843 GN=menF; PE = 3 SV=1
MDNLQSIKAQFIAQINAYQPEKDRDIVVFQCNTETTFSLLAWLKAQQYYPQFYLHGRDGATKWASIGQVRQFSDVSAAAHFIQEQQLALLGGLQFYGDALFVLPRLLLQQRQDGMTITLFIDGKQFEQDKLVALACLSTFEKQTALQTVKQEISLISQKADQAEWCRWVEQGLQKIKQGELSKIVLANERCFKTAAPLAATDLLAESEKYNLGCYHFMLAESEQRAFIGSSPELLYRRHGLQLKTEALAGTAFMGEDEQQNQQQSDWLLHDKKNEYENQLVVDGICQNLQPFVQQITIEKVELKKLRKVQHLRRRISAQLKAGCGDKDILLAMHPTAAVAGLPQLEAKQALRKLENFDRTWYAGTLGVMGPAYADFCVTIRSAFIEQAENDSQLCVFAGAGIVEGSIPLLEWREIERKAMGLVSLLQQNQL

SEQ ID NO: 94510 - protein, 429 aa, Pasteurella skyensis
  REGION 1..429: note = tr|A0A1H7YH09|A0A1H7YH09_9PAST Isochorismate synthase MenF OS=Pasteurella skyensis OX=97481 GN=menF; PE = 3 SV=1
MTVFSQLKTQLKAKLHDVIENKHIHNGLVIIRVEQCCSVDNQLLLSWLKAQHSFPKYYWQNRDNTLTLTSIGAVKYFQDIEKAQQFSTNNHCTLIGGMQFSGETSFILPRLLFAKKEHKVTACLVVDSRNWEKEKIAIDQLFANFEKTIALEKTPYSLLDTAPYTNFQQWSDNIQNTIEHIKQGDFNKIVLANATDLICKEPISAYRLLALSKQKNYHCFHFLWQETQDVSFIGSSPERLYKREQQTLYTEALAGTAMVTGNQKQTEENGKWLLNDPKNNIENQYVVDDICDNLKSYAKEIEVKDTQLKQLPNVQHLCRLIKMELKDDVSDAQCLSHIHPTAAVAGLPRKKAIPFIAQTENFERNWYAGTLGFFNAEQAEFCVTLRSALINKNSMTVYAGAGIVQDSEPESEWKEIQRKALAMIKLLQQ

SEQ ID NO: 94511 - protein, 430 aa, Pasteurella sp.
  REGION 1..430: note = tr|A0A4Y9GX41|A0A4Y9GX41_9PAST Isochorismate synthase MenF OS=Pasteurella sp. WM03 OX=2558280 GN=menF; PE = 3 SV=1
MGSLEQAKSQLSSQIETYLQQGKTDIVRFQATIANINLLAWLKSQTTYPQFYLRFRDENKVIAALGEVRSFCQLNIAQEFIETFDFPLLGGLQFQGYGQFILPQLMIEKNDKTITISCFVEGRASAQTALEQLKTLPKITALCELPKQIPLRTEQRANKQMWCDWVNQALYEIKQGELTKLVLANETVFHLKQAVNAYDFLAESECRNQGCYHFLWAESPHSTFVGSTPERLFAREYNLFLTEALAGTAPITADSKENQQQAEWLLNDEKNLNENWLVVQDISQNIKSMVESIDVSEVELKPLRKVQHLLRKIRANLTAHYRDSALLKAIHPTAAVSGLPQQQARMILSEIETFDRGWYAGTLGLMSEAYSEFCVAIRSAFIEGNRIRVFAGAGIVEGSEPLAEWKEIERKASGLITLFAENNNGEKECL

SEQ ID NO: 94512 - protein, 434 aa, Pasteurella testudinis
  REGION 1..434: note = tr|A0A1W1UAG9|A0A1W1UAG9_9PAST Isochorismate synthase MenF OS=Pasteurella testudinis DSM 23072; OX = 1122938 GN=menF PE=3 SV=1
MDCWQQLKQQLLQLLQNHQVVADQAITQYQFCIALPPDCGNVLAWLKGQPHYPRFFWQARESESQCVALGEVQRFSQLDAAQQFLNQHADQPLHLVGGLTFEGEASFYLPRLWLEQCAERLKVTFSLSATDRQSAVYAFIEGLQGAQTLNAVTAGLYPGEQNYSQTQWQDLVQESLDCIAQGRFTKVVLAQKKTFALSEALDPHDLLAQARRQQPCCYYFLWAQSAQSAFLGISPERLYRRQRQTLFTEALAGTAEYGGDQRQNQQQQQWLLQDGKNIHENRLVVEDICAKLSNLSQHLDIGELSSRTLRYVQHLVRNIGAKLYPEVDDQACLTAIHPSAAVGGLPYAAALKFIAERQNFKRDWYAGTLGVMSLASSEFCVAIRSTLLSKDPQEQDKIAIFSGAGIVAGSVPLLEWQEIERKAAGILSLFPTSG

SEQ ID NO: 94513 - protein, 419 aa, unidentified
  source 1..419: note = Pasteurellaceae bacterium
  REGION 1..419: note = tr|A0A1V3TSV3|A0A1V3TSV3_9PAST Isochorismate synthase MenF OS=Pasteurellaceae bacterium 15-036681; OX = 1924934 GN=menF PE=3 SV=1
MSIFNQLKQQLSQKLNSLQATQGLIQLQAEVDLTVENAELLAWLKGQNTFPHYFWQHRDTDQTIVAIGQIRLFKDLELAEAFSQQHNLLLVGGAQFDGEATFVLPQLLLVKNSQKVTACLNVDLEKPIDLDTLFLAAKPLQEFQANQLIDSQLACAPNCWQQNIALALEEIEQYHFSKVVLANAKTLSFNNPINPYDLLLASQHKNLGCYHFLWSETGEQIFIGSTPERLYQRNDRQFYTEALAGTVAVTEDREETERNALWLLSDQKNIYENLLVVDDICSHLADCTSDIQVGDAEIKRLHNVQHLRRQIHTTLADNVSDADCLARIHPTAAVAGLPRSEAKQFIAQHEAFKRGWYAGTLGYISPKNAEFCVTLRSALIQQNQITIYAGAGIVEGSDPQSEWLEIERKSLAMAGLLRF

SEQ ID NO: 94514 - protein, 485 aa, unidentified
  source 1..485: note = Patulibacter medicamentivorans
  REGION 1..485: note = tr|H0E631|H0E631_9ACTN Menaquinone-specific isochorismate synthase OS=Patulibacter medicamentivorans; OX = 1097667 GN=PAI11_22810 PE=4 SV=1
MAPVAGVSSAQAPAVPIADDDRDRLLRHAAEARKRARRSRRDAVLASITIDVDPAIDPSAVVAVGRRAGEPWTVFEQRDRDRRVVATLGVVQAIEAAGPQRFTTVARRWEALAADAVGDLGTGLDGEGLLAVGGFAFTDEGATTPAWDGFAAASLHVPLLGIAGCGGRIRATVAVRVAAADGDLTAIVDAALERVAALAPARPPLLDPDPVQRGRVVSALPPAHYEEAVARGVQRIRAGEMEKIVLAREVQVTGRPTPDPAAILGVMREAYAGCCVLAVGRGDRTFVAATPELLVRREGHRLATLALAGTTRRSSDPAVEAHLGEHLMRSAKDRGEHAIVVRRILARLDALALWTTAAEQPQIVQAASVQHLATPIRAQLASPIPVVELAGRLHPTPAVGGFPEAVALPLIPAIEGMDRGWYAGPVGWTDSAGDGELCVALRSALLEPELARCFAGVGVVSDSDPAAELAETEAKLQALLPLLAA

SEQ ID NO: 94515 - protein, 440 aa, unidentified
  source 1..440: note = Pectobacterium actinidiae
  REGION 1..440: note = tr|A0A1V2R786|A0A1V2R786_9GAMM Isochorismate synthase MenF OS=Pectobacterium actinidiae OX=1507808; GN = menF PE=3 SV=1
MKQLSDLLRHMQQDLREPLPERAGFRQITRSLVLSDASELLPWLATQPVYPQFYWQHRQDREEAAVCGNVCGFRHIQDAEAFLAQQPCDSDVRIWGLNAFNQTKEGGVSSPGYLFLPRVELRRQDDTLSLSINLFSDTSLQQDAVEASAFLNLLLPPASQPLLHAEVQSVGHQPARQGWITLLQRALHDINNGLMEKVVLARATTLTLTQPLQATTFMAASRAANHHCFHFMLAHDARHAFLGSSPERLYRRRGSELETEALAGTVASDRDAHKAAELADWLMNDTKNQCENMLVVDDICQRLQQSALSLDVMPPEIVRLRKVQHLRRTIHATLRNASDSVCLNALQPTAAVAGLPRQEARRFIAEHESFERNWYAGSAGYLSRQQSEFSVALRSAEVRDHILTLYAGAGIVAGSDPEQEWQELENKAAGLRSLLDGDMS

SEQ ID NO: 94516 - protein, 440 aa, unidentified
  source 1..440: note = Pectobacterium aquaticum
  REGION 1..440: note = tr|A0A426IQE6|A0A426IQE6_9GAMM Isochorismate synthase MenF OS=Pectobacterium aquaticum OX=2204145; GN = menF PE=3 SV=1
MKQLSDLLRHLQQALREPQPECAGFRQITRSLRLSETSELLPWLATQPVYPQFYWQHRQDREEAAVCGNVCGFRHIQDAEAFLVQQQCDPDVRIWGLNAFNQTKEDGVAPPSYLFLPRAELRRQDDTLSLSINLFSDTSLQQDAVEASAFINLLLPPASQPLLHAEVQSVGHQPERQGWIDLLQRALHDINTGLMEKVVLARATTLTLTQPLQATTFMAASRAANHHCFHFMLAHDARHAFLGSSPERLYRRRGTELETEALAGTVASDRDAHKAAELADWLMNDTKNQCENMLVVDDICQRLQQSALSLDVMPPEIVRLRKVQHLRRTIHATLRTASDSACLNALQPTAAVAGLPRQEARRFIAEHEPFERGWYAGSAGYLSLQQSEFSVALRSAEVRDHVLTLYAGAGIVAGSDPEQEWLELENKAAGLRSLLDGDMS

SEQ ID NO: 94517 - protein, 440 aa, Pectobacterium atrosepticum
  REGION 1..440: note = tr|Q6D7W5|Q6D7W5_PECAS Isochorismate synthase MenF; OS = Pectobacterium atrosepticum (strain SCRI 1043 / ATCC BAA-672) OX=218491 GN=menF PE=3 SV=1
MKQLSDLLRHLQQDLREPQPECAGFRQITRSLTLSDASELLPWLATQPVYPQFYWQHRQDREEAAVCGKVCGFRHIQDAEAFLVQQQCDPDVRIWGLNAFNQAKEEGVSSPGYLFLPRAELRRQDDMLSLSINLFSETSLQQDAAEASAFINLLLPSASLPLLHAEVQSVGHQPERQGWIDLLQRALHDINTGLMEKVVLARATTLTLTQPLQATTFMAASRAANHHCFHFMLAHDARHAFLGSSPERLYRRRGSELETEALAGTVASDRDAHKAAELADWLMKDTKNQHENMLVVDDICQRLQQSALSLDVMPPEIVRLRKVQHLRRTIHATLRTASDSACLDALQPTAAVAGLPRQEARRFITAHEPFERRWYAGSAGYLSRQQSEFSVALRSAEVRDHVLTLYAGAGIVAGSDPEQEWQELENKAAGLRSLLDGDMS

SEQ ID NO: 94518 - protein, 447 aa, Pectobacterium betavasculorum
  REGION 1..447: note = tr|A0A093S1E9|A0A093S1E9_9GAMM Isochorismate synthase MenF OS=Pectobacterium betavasculorum OX=55207; GN = menF PE=3 SV=1
MKQLSDLLRHLQQDLREPQPERAGFRQITRSLTLCDTSETLSDASELLPWLATQPVYPQFYWQHRQDREEAAVCGKVCGFHHLQDAEAFLVQQQCDPDVRIWGLNAFNQITEGGTSSPGYLFLPRAELRRQDDMLSLSINLFSETSLQQDADEASAFINLLLPPEPLPILHAEVQAVGHQPERQGWIDLLQRALHDINSGLMEKVVLARTTTLTLTQPLQATTFMAASRAANHHCFHFMLAHDARHAFLGSSPERLYRRWGRELETEALAGTVASDRDALKAAELASWLMKDTKNQHENMLVVDDICQRLQQSALSLDVMPPEIVRLRKVQHLRRTIHATLRTASDSACLDALQPTAAVAGLPRQEARRFIAAHEPFERGWYAGSAGYLSRQQSEFSVALRSAEVRDHVLTLYAGAGIVAGSDPEQEWQELENKASGLRSLLDGDMS

SEQ ID NO: 94519 - protein, 440 aa, unidentified
  source 1..440: note = Pectobacterium brasiliense
  REGION 1..440: note = tr|A0A0M2F3S2|A0A0M2F3S2_9GAMM Isochorismate synthase MenF OS=Pectobacterium brasiliense OX=180957; GN = menF PE=3 SV=1
MKQLSDLLRHLQQDLREPQPERAGFRQITRSLTLSDASELLPWLATQPVYPQFYWQHRQDREEAAVCGNVCGFRHIQDAEAFLVQQQCDPDVRIWGLNAFNQTKEGGASSPGYLFLPRAELRRQDDTLSLSINLFSDTSLQQDAIEASAFINLLLPPAPQPLLHAEVQSVGHQPERQGWIDLLQRALHDINAGLMEKVVLARATTLTLTQPLQATTFMAASRAANHHCFHFMLAHDARHAFLGSSPERLYRRRGSELETEALAGTVASDRDARKATELADWLMNDTKNQCENMLVVDDICQRLQQSALSLDVMPPEIVRLRKVQHLRRTIHATLRTASDSACLNALQPTAAVAGLPRQEARRFIAEHEPFERGWYAGSAGYLSRQQSEFSVALRSAEVRDHVLTLYAGAGIVAGSDPEQEWQELENKAAGLRSLLDGDMS

SEQ ID NO: 94520 - protein, 442 aa, Pectobacterium carotovorum
  REGION 1..442: note = tr|C6DBP1|C6DBP1_PECCP Isochorismate synthase MenF; OS = Pectobacterium carotovorum subsp. carotovorum (strain PC1) OX=561230 GN=menF PE=3 SV=1
MTVKQLSDLLRHLQQDLREPQPERAGFRQITRSLTLSDTSELLPWLATQPVYPQFYWQHRQDREEAAVCGNVCGFRHLQDAEAFLAQQQCDPNVRIWGLNAFNQIKESGTSSPGYLFLPRAELRRQDDTLSLSINLFSDTSLQQDAAEASAFLNLLLPPAPSPLLHAEVQSVGHQPERQGWIDLLQRALHDIKAGLMEKVVLARTTTLTLTQPLQATTFMAASRAANHHCFHFMLAHDARHAFLGSSPERLYRRRGSELETEALAGTVASDRDAHKAAELGDWLMNDTKNQCENMLVVDDICQRLQQSALSLDVMPPEIVRLRKVQHLRRTIHATLRTASDSACLNALQPTAAVAGLPRQEARRFIAEYEPFERGWYAGSAGYLSRQQSEFSVALRSAEVRDHILTLYAGAGIVAGSDPEQEWQELENKAAGLRSLLDGDMS

SEQ ID NO: 94521 - protein, 440 aa, unidentified
  source 1..440: note = Pectobacterium odoriferum
  REGION 1..440: note = tr|A0A094TJ05|A0A094TJ05_9GAMM Isochorismate synthase MenF OS=Pectobacterium odoriferum OX=78398; GN = menF PE=3 SV=1
MKQLSDLLRRLQQDLREPQPERAGFRQITRSLALSDASELLPWLATQPVYPQFYWQHRQDREEAAVCGNVCGFRHIQDAEAFLAQQQCDSDVRIWGLNAFNQTKEDDVASPGYLFLPRAELRRQDETLSLSINLFSDTSLQQDAVEALAFINLLLPPASQPLLHAEVQSVGHQPERQGWIDLLLRALHDINTGLMEKVVLARATTLTLTQPLQATTFMAASRAANHHCFHFMLAHDARHAFLGSSPERLYRRLGSELETEALAGTVASARDAHKAAELADWLMNDTKNQCENMLVVDDICQRLQQSALSLDVMPPEIVRLRKVQHLRRTIHATLRTASDSACLNALQPTAAVAGLPRQEARRFIAEHEPFERGWYAGSAGYLSRQQSEFSVALRSAEVRDHVLTLYAGAGIVAGSDPEQEWQELENKAAGLRSLLDGDMS

SEQ ID NO: 94522 - protein, 442 aa, unidentified
  source 1..442: note = Pectobacterium parmentieri
  REGION 1..442: note = tr|A0A0H3I7V6|A0A0H3I7V6_PECPM Isochorismate synthase MenF OS=Pectobacterium parmentieri OX=1905730; GN = menF PE=3 SV=1
MTVKLLSDLLRHMQQDLREPQPERAGFRQITCSLSLSEASELLPWLATQPVYPQFYWQHRQDREEVAVCGKVCGFRHIQDAEAFLVQQQCDPDVRIWGLNAFNQSKEEGASSPGYLFLPRAELRRQDDTLSLSINLFSETSLQQDAVEASAFINLLLPPASQPLLHAEVQSVAHQPERQGWIDLLQRALHDINTGLMEKVVLARATTLTLTQSLQATTFMAASRAANHHCFHFMLAHDARHAFLGSSPERLYRRRGSELETEALAGTVASDRDALKAAELADWLMKDTKNQCENMLVVDDICQRLQQSALSLDVMPPEIVRLRKVQHLRRTIHATLRTASDSACLNTLQPTAAVAGLPRQEARRFIAAYEPFERGWYAGSAGYLSRQQSEFSVALRSAEVRDHVLTLYAGAGIVAGSDPEQEWQELENKAAGLRSLLDGDMS

SEQ ID NO: 94523 - protein, 440 aa, unidentified
  source 1..440: note = Pectobacterium peruviense
  REGION 1..440: note = tr|A0A0J5XV69|A0A0J5XV69_9GAMM Isochorismate synthase MenF OS=Pectobacterium peruviense OX=2066479; GN = menF PE=3 SV=1
MKQLSDLLRHLQQDLREPQPERAGFRQITRSLTLSEASELLPWLATQPVYPQFYWQHRQDREETAVCGKVCGFHHLQDAEAFLVQQQCDPDVRIWGLNAFNQIKEGSTSSPGYLFLPRAELRRQDDTLSLSINLFSETSLQQDADEASAFINLLLPPASLPILHAEVQSVGHQPERQGWIDLLQRALHDIKAGLMEKVVLARATTLTLTQSLQATTFMAASRAANHHCFHFMLAHDARHAFLGSSPERLYRRRGRELETEALAGTVASDRNVLKAAELASWLMKDTKNQHENMLVVDDICQRLQQSALSLDVMPPEIVRLRKVQHLRRTIHATLRTASDSACLDALQPTAAVAGLPRQEARRFIAAHEPFERRWYAGSAGYLSRQQSEFSVALRSAEVRDHVLTLYAGAGIVAGSDPEQEWQELENKAAGLRSLLDGDMS

SEQ ID NO: 94524 - protein, 440 aa, unidentified
  source 1..440: note = Pectobacterium polaris
  REGION 1..440: note = tr|A0A3A4AZ56|A0A3A4AZ56_9GAMM Isochorismate synthase MenF OS=Pectobacterium polaris OX=2042057 GN=menF; PE = 3 SV=1
MKQLSDLLRHLQQDLREPQPERAGFRQITRSLTLSDASELLPWLATQPVYPQFYWQHRQDREEAAVCGNVCGFRHIQDAEAFLVQQQCDPDVRIWGLNAFNQTKEDGAASSGYLFLPRAELRRQDDTLSLSINLFSDTSLQQDAVEASAFINLLLPPASQPLLHAEVQSVGHQPERQGWIDLLQRALHDINAGLMEKVVLARATTLTLTQPLQATTFMAASRAANHHCFHFMLAHDARHAFLGSSPERLYRRRGSELETEALAGTVASDRDARKAAELADWLMNDTKNQCENMLVVDDICQRLQQSALSLDVMPPEIVRLRKVQHLRRTIHATLRTASDSACLNALQPTAAVAGLPRQEARRFIAEHEPFERGWYAGSAGYLSRQQSEFSVALRSAEVRDHVLTLYAGAGIVAASDPEQEWQELENKAAGLRSLLDGDMS

SEQ ID NO: 94525 - protein, 398 aa, unidentified
  source 1..398: note = Pectobacterium polonicum
  REGION 1..398: note = tr|A0A4U7KDL1|A0A4U7KDL1_9GAMM Isochorismate synthase OS=Pectobacterium polonicum OX=2485124; GN = EDI29_14845 PE=4 SV=1
MDTLITETETFSGLTYSEQTAFLYASEHRSLSTSGLFERISSPVCAPGSHDDRLSSAIAQAFQRARQAGQSLPIVVGAIPFDTTQPSCLYIPDSYTVTTKSELVSRARKYTTAAPKASTLNSVPDECQFKSIVAEAVERFRRGELSKAVLSRILDIELTEPVKAQTILNNLMVQNAGGYHFSLPLPDGSVLLGASPELLLRKQGSVIVSNPLAGSARRMSDEHLDYLNSQRLLHSGKDKHEHKLVVDDIRQRLMPLCVSLTIPSAPSLMSTASMWHLSTAIRGELVNPEMTALQVACQLHPTPALCGFPTQEARQLIAELEPHDRGVFSGIVGWCDANGDGEWAIAIRCGTIKHNKVRLFAGAGIVEASVPEDEWAETAAKLNTMLNAFGLNSGVDGL

SEQ ID NO: 94526 - protein, 440 aa, unidentified
  source 1..440: note = Pectobacterium punjabense
  REGION 1..440: note = tr|A0A2T3W0P7|A0A2T3W0P7_9GAMM Isochorismate synthase MenF OS=Pectobacterium punjabense OX=2108399; GN = menF PE=3 SV=1
MKQLSDLLRHMQQDLREPQPERAGFRQITRSLRLSEAAELLPWLATQPVYPQFYWQHRQDREEVAVCGKVCGFRHIQDAEAFLVQLQCDPDVRIWGLNAFNQSKEEGASSPGYLFLPRAELRRQDDTLSLSINLFSETSLQQDAVEASAFINLLLPPAPLPLLHAQVQSVAHLPERQGWIDLLQRALHDIKTGLMEKVVLARATTLTLTQPLQATTFMAASRAANHHCFHFMLAHDARHAFLGSSPERLYRRRGSELETEALAGTVASDRDAHKAAELADWLMKDTKNQCENMLVVDDICQRLQQSALSLDVMPPEIVRLRKVQHLRRTIHATLRTASDSACLNTLQPTAAVAGLPRQEARRFIAANEPFERGWYAGSAGYLSRQQSEFSVALRSAEVRDHVLTLYAGAGIVADSDPEQEWQELENKAAGLRSLLDGDMS

SEQ ID NO: 94527 - protein, 440 aa, Pectobacterium wasabiae
  REGION 1..440: note = tr|A0A1D7Z3W9|A0A1D7Z3W9_9GAMM Isochorismate synthase MenF OS=Pectobacterium wasabiae CFBP 3304; OX = 1175631 GN=menF PE=3 SV=1
MKLLSDLLRHMQQDLREPQPERAGFRQITRSLSLSEASELLPWLATQPVYPQFYWQHRQDREEVAVCGKLCGFRHIQDAEAFLIQQQCDPDVRIWGLNAFNQVKEEGASSPGYLFLPRVELRRQDDTLSLSINLFSETSLQQDAVEASAFINLLLPPASQPLLHAEVQSVAHQPERQGWIDLLQRALHDIKTGLMEKVVLARATTLTLTQPLQATTFMAASRAANHHCFHFMLAHDARHAFLGSSPERLYRRRGSELETEALAGTVAGDRDALKAAELADWLMKDTKNQCENMLVVDDICQRLQQSALSLDVMPPEIVRLRKVQHLRRTIHATLRTASDSACLNILQPTAAVAGLPRQEARRFIAAYEPFERGWYAGSAGYLSRQQSEFSVALRSAEVRDHVLTLYAGAGIVAGSDPEQEWQELENKAAGLRSLLDGDMS

SEQ ID NO: 94528 - protein, 363 aa, Pedobacter sp.
  REGION 1..363: note = tr|A0A519WVX9|A0A519WVX9_9SPHI Isochorismate synthase OS=Pedobacter sp. OX=1411316 GN=EOO85_12330 PE=4; SV = 1
MNDLFEKIKSQLNSKYPFAIYCKPGSSTATGIFQNDNVMDYKADFTREGFVFAPFHDGKRLFIPTEAAEINRFEIEPEVTKSELYGIIIDQKEKNDFELIVREAVGEINNSELQKVVLSRKQEISGSVDIEKTFKKILQAYPKAFRYCFYHPVSGMWMGATPERLLNLEGIEMSTVALAGTQLYKEGEEAVWEEKEKLEQKFVTDFITDSIGDYVTDIYKTEPYTFRAGNIVHIRTDISGKVKDASNLSELIEALHPTPAICGLPRDTALRFIQKNEKYEREYYSGFLGEINFDQERAGMVQTDLFVNLRCMKLQKSKVSLFVGCGIIKNSNPEKEFVETVNKATTMASVLTLKDTVEMHNSF

SEQ ID NO: 94529 - protein, 435 aa, Pelagibacterium sp.
  REGION 1..435: note = tr|A0A369W1T3|A0A369W1T3_9RHIZ Isochorismate synthase OS=Pelagibacterium sp. XYN52 OX=2282655; GN = DVH29_14655 PE=4 SV=1
MSIRVMLRRRVVRREALPAASTRCFGRIGPFAIIQAHMTAQARRGRMTINSVPNRTQQMPDPAPHALFRSANSQFSTQGVGAALPAGPLDTLGARVRDFFRTADGPQVLLGTLPFDRAQPDCLFQPQAIADIVPQPPLAAVAQHGRWRVTAHPSQAEYGAMVDRALERIASDAGLNKVVLARTLVVETDAALDPRSVAMRLGRDPSITTFVMPVSLDGPARTLVGATPELLLQKKGRAIRSSPLAGSAKREADRSVDREAAEALAASDKNRREHAVVVEAIMDALAPCCAQLTAPDGPALHATASMWHLGTPIEGRLRDDDISCADLLARLHPTPAICGVPRERAQALIRELEPFDRGFYAGAVGWTDASGDGEWHIALRCGEIADRRITLFAGAGIVAGSDPAAEIAETSAKFLALLHALGIDEHGRPLDGVDS

SEQ ID NO: 94530 - protein, 470 aa, unidentified
  source 1..470: note = Pelagibaculum spongiae
  REGION 1..470: note = tr|A0A2V1H0R0|A0A2V1H0R0_9GAMM Isochorismate synthase MenF OS=Pelagibaculum spongiae OX=2080658 GN=menF; PE = 3 SV=1
MTQFIPGYSRACASLDQQLIDTKKRINPLDQRRLIRLETPVEPISALEWLQAQRMLPRTYWRDRDGKAIRAGIGYAVKMPVNVAEVSPLLKTASELLKNCDGDAAIMSAFSFDQQATQWGGFGCGQMVLPRIELVEKNQRHVLAINLLLEPGQVDAELNRARKSLASLQYPTGLPELPMLLGQPVHHPAYNGWQDRVKQLLQAFKRGDMQKVVLSRCSEWKAAHALSPWRLLADWGQREAESFRFGWQLNDRDAFVSCTPERLFQRRGLLLRTEALAGTAPRSEGKAEDQALAQALLNDSKNGHENRLVLEDIHNRLQPLCQQLEHSQDMSLVRLSKVQHLRHTLRGVLKKDSDADLLQTLHPTPAVGGVSRENAMAWLRKHEGYFRGWYAGAAGCIKADSSEFCVTIRSVRIKEGSLQAFAGAGIVAGSNPQAEWQEINAKTSALLSLFKQEDPCLSPVQHPMQAIDQR

SEQ ID NO: 94531 - protein, 473 aa, unidentified
  source 1..473: note = Pelodictyon luteolum
  REGION 1..473: note = tr|Q3B611|Q3B611_PELLD Isochorismate synthase MenF; OS = Pelodictyon luteolum (strain DSM 273 / 2530) OX=319225; GN = menF PE=3 SV=1
MSDHHIIITPTETPLPIAQAAEAIQTALQQHGRDGANPLHPPGTLMLFRQPLQPSDPAKWLAAQNIRPRIFWRNREQDYAAAGIGVADRITYSGREQNSSAFRILGESMAQKSRAARYFGGISFNNIEQQDHDWKNFPAFSFILPLLELSMENGACTLTCHILAGTPDETLARIEDARTLIASLPSDAGDNGERLPAVTGRSCSPDREGWIRNCGKAIATFEDGSTEKIMLARKTTLEFASACNPMLFLLRHPYPQNSTYRFYFEPEEGCAFLSFTPERLYRRDGSRLLTEALAGTCSKEGADLTDEHASRALLGSEKDIREHRFVKDMIYNELLPACSQIEMEDEVQVLQLNRLAHLYTRCSAVLKPECTDDGEVLSILHPTPAVGGVPKEEAMRHIMELEPFSRGWYAAPVGWIMRDAAEFAVGIRSALVNGTTASLYSGAGLVRGSDPELEWDEVEQKIGDLLAITEDKA

SEQ ID NO: 94532 - protein, 468 aa, unidentified
  source 1..468: note = Pelodictyon phaeoclathratiforme
  REGION 1..468: note = tr|B4SET4|B4SET4_PELPB Isochorismate synthase MenF; OS = Pelodictyon phaeoclathratiforme (strain DSM 5477 / BU-1) OX=324925 GN=menF PE=3 SV=1
MIIPSEEPLSIEKAVSSLASALALYGDKHVEPDQREQHLLVTFRQPLQPTEPDEWLSSQSVYPRLFWMNRERDFSVAGIGIADSIACEGAGNNGDNFRQFALSVKDKNPDARYFGGFRFNNEEKQDPIWQPFSSFSFVLPLLQLTFENGAFALSCHLWVEIGDDIHKKISALTDLLDRVVTDTNSTVMKLPELLHLSYNPDEKEWMEECRKALLTFESGEMEKIMLARQTTLEFTSIFSPLLFLLHYPYKQNTIFRFYFEPAPNHAFFSFTPERLYRRDGNMLLTEALAGTCSKESINGDDHLASEVLLNSEKDIREHNFVREMIYQELQKICSNIDMEKEVNVLQLNRLAHLYTRCTAQLKPEFEYDSAILQLLHPTPAVGGVPKAPAMQHIMELEPFSRGWYAAPIGWVSRDAAEFCVGIRSALVHGRFAYLYSGAGLVKGSNPFAEWEEVDQKIGDILAISRQEA

SEQ ID NO: 94533 - protein, 411 aa, Pelosinus fermentans
  REGION 1..411: note = tr|I8U1V8|I8U1V8_9FIRM Isochorismate synthase; OS = Pelosinus fermentans JBW45 OX=1192197 GN=JBW_01671 PE=4; SV = 1
MKHQSNSAVLEKQLLNDYQVGDFFFTSPKRTLLGKGSFAVVPSDKEKENQLECLAERVLAALENAKEHGYSNPVVVGAVPFDYKKNVQLIVPETIKLSTPSQFDSINPLKSSMASTYEIKSVPEPAQYKEGVEKGIHYIETGHLSKIVLSRSLHLTSSTTVDIHQLLHNLAQHNTLGYTFAVDLPKNISDKSGLNVSFSTGRTLIGASPELLVTKTGLHLMANPLAGSRPRSEDPGEDQRLAAELLSSTKDLHEHKVVVSAVAAALRPYCLTLDVPEEPSLMHTETMWHLSTVIKGEIKRPSTSSLELAIALHPTPAVCGSPTELAREAIGEIEPFDRGFFAGMVGWCDANGDGEWAVTIRCAEVEARSLRLFAGAGVVAESTPEEELTETSAKFRTMLFAMGLSKDVVYK

SEQ ID NO: 94534 - protein, 380 aa, Pelotomaculum schinkii
  REGION 1..380: note = tr|A0A4Y7R8M5|A0A4Y7R8M5_9FIRM Salicylate biosynthesis isochorismate synthase OS=Pelotomaculum schinkii OX=78350 GN=pchA PE=4 SV=1
MKYQKTEVKLDNSLSFWKHFDKEERVLFYNPLNNELIIGAKRLKTFGQEENYNNYLYVFSSRTFFDSVKDQKWAEFGNETVAFEYYLVEKKGKQTLYYFEDLVEIENLKIKSNEHFYNISADDYEEWKELFANVYYEISSRKVNKVVISREVKIVCETLVNTESVLKNLLEKNQNSFIFAYFKNGKTFLGATPEILVQKEKDNIISYALAGTILRNDEDDELQKMMLLNDRKNRYEHQIVIDKIADVMKQYIRDVIIDEIKILTLKNLHHLQTRIYGKDNSTLSEWVTRLHPTPALGGNPAYKALEIIKKYEKHERGLYAAPIGIMDENGDGIFVAGIRSALICKNMVFAYTGGGIVDKSECEAEYIETNNKLKTIIESL

SEQ ID NO: 94535 - protein, 380 aa, Pelotomaculum sp.; identical to SEQ ID NO: 94534
  REGION 1..380: note = tr|A0A4Y7S875|A0A4Y7S875_9FIRM Salicylate biosynthesis isochorismate synthase OS=Pelotomaculum sp. FP OX=261474 GN=pchA PE=4 SV=1

SEQ ID NO: 94536 - protein, 128 aa, unidentified
  source 1..128: note = Peptoniphilus duerdenii
  REGION 1..128: note = tr|E0NK91|E0NK91_9FIRM Chorismate binding enzyme; OS = Peptoniphilus duerdenii ATCC BAA-1640 OX=862517 GN=irp; PE = 4 SV=1
MEVLERGSVQHLASRLKGTLKEEFNEWHAFTTLFPAVTASGIPKTECIDAIDRLEKDERGLYSGGVLTYDQNGTMDVALALRTAFQTDKETWIRVGAGIVKLSKAERELEETKEKAGSILDKLVYIED

SEQ ID NO: 94537 - protein, 357 aa, unidentified
  source 1..357: note = Petrimonas mucosa
  REGION 1..357: note = tr|A0A1G4G4P1|A0A1G4G4P1_9PORP Vibriobactin-specific isochorismate synthase OS=Petrimonas mucosa OX=1642646; GN = vibC PE=4 SV=1
MIGEEKSLTLDRLIERDACFAIYRLPGEPTPRFVMQGDRHPLLLNDIGALNRQQGFVMAPFRVTDSSPLILIRPDFTDLDNVTIPSAGENGVKPVEKDAKRYRRADYNLLFHRFHKPLLSGEIEKLVLSRNKRIEREETFSPGKSFFKAAEKYPRSFVYLLHTPQSGTWLGSTPEILLAGSHNNWQTISLAGTRYPNSGNVSWDDKNLREQHLVTSYILKQLTSFHISPEINGPYTIKAGALAHLRTDFSFSLPDKAVIGSLLKALHPTPAVSGLPKEQAFQFITEHEGYDRRYYTGFLGMLDPSAETTLYVNLRCMQIGKNHLTLYAGSGLLASSTCREEWKETEQKLKTMASIVK

SEQ ID NO: 94538 - protein, 423 aa, Phocoenobacter uteri
  REGION 1..423: note = tr|A0A379C954|A0A379C954_9PAST Isochorismate synthase MenF OS=Phocoenobacter uteri OX=146806 GN=menF; PE = 3 SV=1
MLFNQLKQQLEYELTQIIPNKGLIKIEVQSNKKAENTLFLRWLNAQSIFPKFYWQNRDDNLTLTAIGTVKSFDNIQQAQQFNQQNNNTLLGGIKFCGQTTFILPRLLFAKNQKKMTACLMVDTDHLDTEIPQIHDILEKFDNASTLNQTQYTILETTQATDFSQWSRNIQSAIEKIKQGCFNKVVLANATNFKCKETISAYELLALSQQKNQHCFHFLYQEDRYSAFIGSSPERLYKREQQRFYTEALAGTVAVTEDPTQTEKNGQWLLNDSKNTLENQYVVDDICSHLAPYISSVIVSDIHLKRLPKVQHLRRFIEMQLKENISDIDCLNQIHPTAAIAGLPRPNAIEFINQTENFKRQWYAGTLGFFNQAQAEFCVTLRSAQINKNTITIYAGAGIMQDSDPHSEWQEIERKALAMAELLK

SEQ ID NO: 94539 - protein, 537 aa, unidentified
  source 1..537: note = Phormidesmis priestleyi
  REGION 1..537: note = tr|A0A0P7ZM53|A0A0P7ZM53_9CYAN Menaquinone-specific isochorismate synthase MenF OS=Phormidesmis priestleyi Ana; OX = 1666911 GN=menF PE=4 SV=1
MPVVQHEIDIFDTSYERARSLRFLTCAQQQAIQLGQAKIASLTFMARPIAPWVVLSALGEPSERHAYYDSPQPLSMVGIGVAVAFEAAGTNRFSRSQDFINFWQRQFLYAEPVRYSRLSALSAPDSSVTPLSNQLPNQLPNYLAPSRSPVTDLAARQAERQRGHFFFSATFFAEPVPEPDPEPPKEPTEESPEELTGQPAEFEPAYVFVPKIQVQTSAEASVVTFNCLVSPTTDVSSAVDWMYERLRRLITAEQISYRPVGYLGGRSVAKDVANFENAVTAALKQVQAKKLHKVVLADVMDVVVAQPVDVVRSLQALRRHHPDCTVFSVGNGRGQSFIGASPERLLTITQGQLTTEALAGTTSRAVNRGIDWQLGQTLLHSQKERYEHRVVVEFIVEQLRSLGLNPHYAASPQLLRLLHVQHLHTPISAALNSPQSVQPLEVLAKLHPTPAVAGVPPQRACEFIRQHERFNRGLYTAPFGWIDTEGNSEFIVGIRSALIDGCKARLYAGAGIVAGSEPAKELAEIKLKLQTLLNALV

SEQ ID NO: 94540 - protein, 473 aa, Phormidium sp.
  REGION 1..473: note = tr|A0A0P8BZK5|A0A0P8BZK5_9CYAN Menaquinone-specific isochorismate synthase MenF OS=Phormidium sp. OSCR; OX = 1666905 GN=menF PE=4 SV=1
MVVQPSPTQCFKNCQDIERFLFNCQQKLAKTGRSHWLSLRIILPDLDPLMAFDQHHRCDRPSFYLENPSQQQAIAAWGSCCETIANGPQRFQQIQAFVQDCQENATLINPRLGQSPGLQIFCSFSFFDDGANRLFPAASAFLPQWQLSHQQGQTLATCNLPLSHHSDLARLSQDTWQTLQQLRSLPSRSLSRDPQRVPQAVSCDWRDIQQFQTNVQRALGAIEAKHLQKVVLSHAIDLQARSPFHLTTALAQLRHRYPDCYSFAVGNGNGQYFIGASPERLLGSRDRQLVADALAGSAPRGETPSTDAQLANHLLSSPKERHEHRVVLHFIQQQLQRLGLPLHPVPPIRLLQLSNIQHLWTPVRASLPESVHPLDVLAQLHPTPAVAGVPCQPACQAIRDWETLDRQLYAAPLGWVNGQGDSEFIVGIRSALINGDRARLYAGAGIVAGSDPAKELAEIQLKLQALLNTLNSQ

SEQ ID NO: 94541 - protein, 458 aa, Photobacterium angustum
  REGION 1..458: note = tr|Q1ZRP6|Q1ZRP6_PHOAS Isochorismate synthase MenF; OS = Photobacterium angustum (strain S14 / CCUG 15956); OX = 314292 GN=menF PE=3 SV=1
MSRIGVIELSEVILTALQQAVERLIAKLEQASATTQRILVKLELSKHIDLIDWMDTQALYPKFYWQSRNCREEVVALGQIKTFTDPKAAEKVISNEQRVWGGRSFDGRTERNKRCLSSFFFLPLLELSRLDNEWHIAVNVGEDRARIVTALQQLMFDTSLISGIHSKILNRSNTPDFSGWSNMLTRALDAIEHKEFEKVVLARRTTLQLDKPVSPAQLLKASCANNSNSFHFLLALDEKHGFVGSTPERLFQRHEHAIQTEALAGTIGRGKDDVEDQQLAQWLLSDNKNRYENRLVVDDIVNRLVPCSQSMNVSQTPELVQLRKVQHLKRSIDAELNSGVFSADLLDNLQPTAAIAGLPRDPALHFIAENEPFSRGWYSGAVGYISQQHSEFCVAIRSALIIEGEVHLFAGAGIVPGSVAESEWKELDRKTSTLCSLFEQETDSALAAEFEYKNASCN

SEQ ID NO: 94542 - protein, 438 aa, Photobacterium aphoticum
  REGION 1..438: note = tr|A0A0J1GI60|A0A0J1GI60_9GAMM Isochorismate synthase MenF OS=Photobacterium aphoticum OX=754436; GN = menF PE=3 SV=1
MTALQKAVEFLINKIQQSAATTQRLTVKLELPANTDLIDWMESQPLFPKFYWQSRDSREEVVALGQIRTFTDPKAAEQVLDTEQRIWGGRSFDGRTHRNQRCLSSFFFLPVLEVSRVDGDWQLAVNLSDEHRQKVLDGLAQISADSAEVPAITSKILGRRYSPDFSGWSQMISNALDAISNKVFEKVVLARKTTLTLDAPVSPAQLLKASRSRNHHSFHFMMAMDAKHCFVGSTPERLFLRQERDLHTEAVAGTTGRGANAEEDANLAQWLLDDSKNRYENRLVVDDIVSRLVPRCSSMNVAQTPELIQLRKVQHLKRGIDAQLNDQVYSAELLESLQPTAAIAGLPRDEALAFISENEPFARGWYSGAVGFLSGNRSEFCVAIRSALIMDGEVHLFAGAGIVPGSTADSEWKELDRKTSTLCSLLASEEGEWERKTA

SEQ ID NO: 94543 - protein, 438 aa, unidentified
  source 1..438: note = Photobacterium aquae
  REGION 1..438: note = tr|A0A0J1GW69|A0A0J1GW69_9GAMM Isochorismate synthase MenF OS=Photobacterium aquae OX=1195763 GN=menF; PE = 3 SV=1
MTALQQAVEFLIRKIQQSAPTTQRLMVKLELPANTDLIDWLDSQPLFPKFYWQSRDGREEVVALGQIKTFTDPKAAEKILAPEQRIWGGQSFDGRTARNQRCLPSFFFLPVAELARTDGDWYLAVNISPESTSKVLSALSQLSIESSEVLEIKSKILGRTYSPDFSGWSTMISNALEAISQKVFEKVVLARKTTLTLDTPVAPAQLLKASRSSNHHSFHFMMALDAKHCFVGSTPERLFLRQERALLTEAVAGTIGRGNSPAEDNRLAQWLLDDNKNRYENRLVVDDIVSRLEACCDTMNVAETPELIRLRKVQHLKRGIDAQLNSDVDSADLLESLQPTAAIAGLPRDKALDFITEHEPFARGWYSGSVGFLSQQRSEFCVAIRSALIMGDQLHLFAGAGIVPGSTADSEWKELDRKTSTLCSLFGSDETDWERKTA

SEQ ID NO: 94544 - protein, 444 aa, Photobacterium aquimaris
  REGION 1..444: note = tr|A0A1Y6L2U2|A0A1Y6L2U2_9GAMM Isochorismate synthase MenF OS=Photobacterium aquimaris OX=512643; GN = menF PE=3 SV=1
MTALQQAVELLVAKIKQASITTQRLRVKLELPANTDLIDWMDAQPLFPKFYWQSRDCREEVVALGQIKTFTDPLTAEKVISNDQRVWGGRSFDGHTDRNRRCLSSFFFLPLLEIIRFDGEWHLAANMSDDKPRMLAMLNKIATNPEVVADINSRILSRSYSPDFAGWSTMIDQALASIANDEFEKVVLARRTTLQLDHPVLPAQLLKASRASNSNSFHFLMALDAEHCFIGSTPERLFQRHDRVLQTEALAGTIGRGVDAQEDQQLAQWLLADTKNRYENRLVVDDIVERLVPQCESMNVAPVPELVQLRKVQHLKRSIDGQLNDTVFSANLLDSLQPTAAIAGLPRDAALNFISEHEPFARGWYSGAVGYIGQKHSEFCVAIRSAMISGDDLYLFAGAGIVPGSVADSEWKELDRKTSTLCSLFEQPDSGEDNIMDNMGYKSA

SEQ ID NO: 94545 - protein, 455 aa, unidentified
  source 1..455: note = Photobacterium damsela
  REGION 1..455: note = tr|A0A1V1V4T4|A0A1V1V4T4_PHODP Isochorismate synthase MenF OS=Photobacterium damsela subsp. piscicida; OX = 38294 GN=menF PE=3 SV=1
MTALQQAVEHLIAKIQQAKQTTHRVMVQLDLPIQAELIDWMENQPVFPKFYWQSRDGQEEVVALGQVKTFTDPLAAEKVIHDDQRVWGGRSFDGRTDRNRRCLSAFFFLPQLEIMRHGQTWSVAINLGDDYQKVLDGLAKLRFSSVVVDEISSRIVNRTYAPDFSGWASMIGQALDAISHKVFEKVVLARRTTLQLDTPVTPAQMMKASRANNSNSFHFMMALDAQHCFIGSTPERLFQRHEHALQTEALAGTIGRGKTAREDDELASWLMNDNKNGYENQLVVDDIVSRLNSCSHSLHVAHQPELVRLRKVQHIKRHIEAELNPQVFNTELLHNLQPTAAIAGLPREKAMEFISEHEPFSRGWYSGAVGYLSRQHSEFCVAIRSALIAGEELHLFAGAGIVPGSDPSSEWKELNRKTSTLCSLFESLPSDIEAKKASMMQLETWEQNEKWQQTA

SEQ ID NO: 94546 - protein, 465 aa, Photobacterium damselae
  REGION 1..465: note = tr|D0YVI1|D0YVI1_PHODD Isochorismate synthase MenF; OS = Photobacterium damselae subsp. damselae CIP 102761; OX = 675817 GN=menF PE=3 SV=1
MVQCELSEVTLTALQQAVEHLIAKIQQAKQTTHRVMVQLDLPIQAELIDWMENQPVFPKFYWQSRDGQEEVVALGQVKTFTDPLAAEKMIHDDQRVWGGRSFDGRTDRNRRCLSAFFFLPQLEIMRHGQTWSVAINLGDDYQKVLDGLAKLRFSSVVVDEISSRIVNRTYAPDFSGWASMIGQALDAISHKVFEKVVLARRTTLQLDTPVTPAQMMKASRANNSNSFHFMMALDAQHCFIGSTPERLFQRHDHALQTEALAGTIGRGKTAREDDELASWLMNDNKNGYENQLVVDDIVSRLNSCSHSLHVAHQPELVRLRKVQHIKRHIEAELNPQVFNTELLHNLQPTAAIAGLPREKAMEFISEHEPFSRGWYSGAVGYLSRQHSEFCVAIRSALIAGEELHLFAGAGIVPGSDPSSEWKELNRKTSTLCSLFESLPSDIEAKKASIMQLETWEQNEKWQQTA

SEQ ID NO: 94547 - protein, 470 aa, Photobacterium frigidiphilum
  REGION 1..470: note = tr|A0A2T3JPK3|A0A2T3JPK3_9GAMM Isochorismate synthase MenF OS=Photobacterium frigidiphilum OX=264736; GN = menF PE=3 SV=1
MLNDRHILQSARDDRYGAIELSEVTLTALQTAVDLLIQKIQQSSDTTQRLMVSLDLPANTDLIDWMDSQPLFPKFYWQSRDCREEVVALGQVKTFTDPMVAEKVLADDQRIWGGRSFDGRTNRNRRCLSSFFFLPQLEVIRMDGNWQLAVNLSTDKDKMVETLNKISSTATEVAEIDSHIIGRTHSPDYSGWSSMIAQALESISNKVFEKVVLARRTTLTLDTPVAPAQLLKASRKSNNNSFHFMMALDAKHCFVGSTPERLFHRHDRDLKTEALAGTIGRGFDASEDHRLANWLMADNKNGYENRLVVDDIVNRLTPCCESMNVAQTPELIRLRKVQHLKRGIDAQLHEQVYSADLLDNLQPTAAIAGLPRDKALAFISEHEPFARGWYSGAVGFLSRQRSEFCVAIRSALMMGDEVHLFAGAGIVPGSTADSEWKELDRKTATLCSLLESDKPDKRSSDRPELERKIA

SEQ ID NO: 94548 - protein, 438 aa, Photobacterium gaetbulicola
  REGION 1..438: note = tr|A0A0B9GYB6|A0A0B9GYB6_9GAMM Isochorismate synthase MenF OS=Photobacterium gaetbulicola OX=1295392; GN = menF PE=3 SV=1
MTALQKAVELLLEKIRQSTPITQRLTVKLDLPANTDLIDWMESQPLFPKFYWQSRDCREEVVALGQIKTFTDPKAAEKILADEQRIWGGRSFDGRTQRNRRCMPSFFFLPVLEIFRVDGSWQMAVNLSEQSRDKVIDALAQLTLDTAVVPQITSKILGRTYSPDFSGWSQMIGNALEAISQKVFEKVVLARKTTLTLDTPVSPAQLLKASRGSNHHSFHFMMALDAKHCFVGSTPERLFLRQEQDLQTEALAGTIGRGADMAEDDRLAQWLLDDNKNRYENRLVVDDIVDRLVPRCISMNVAQTPELIRLRKVQHLKRGIDAQLNDGVENSELLDSLQPTAAIAGLPRDKALDFISENEPFARGWYSGAVGFLGARRSEFCVAIRSALIMGDELHLFAGAGIVPGSTADSEWKELDRKTSTLCSLLASDEPEWERQTA

SEQ ID NO: 94549 - protein, 443 aa, unidentified
  source 1..443: note = Photobacterium galatheae
  REGION 1..443: note = tr|A0A066RSC5|A0A066RSC5_9GAMM Isochorismate synthase MenF OS=Photobacterium galatheae OX=1654360; GN = menF PE=3 SV=1
MFHFCQAMATLIERIKRAAEGVVRLVEPLNDQPLTGTSVNPCIDWFDAQPVYPKLYWQSRDGYEEVVALGQQVTFSDPMPAYAILQDDQRIWGCRAFDGQADNCDTAKSSFFFLPHLELIRTGEYWSLAVNLHAGKETVIKVLQQLISEYLPVSPITSGIVSVRHTPTKDGWHTLVKGALNDIQAQLMDKVVLARQTTVTFDSACTAAQVLKASQQENRHSFHFLLALDARRAFLGSTPERLYRREGRRLQTEALAGTIGRGTNGAHDQRLGRWLCLDAKNLQENQYVVDDILERIRPYTDSVTVDESVSLVRLRQVQHLKRHISGVLQPDVCGAKLLHALQPTAAVAGLPRQQAMQFILNHEPFERGWYAGSLGYVSLPKAEFCVALRSAYLMDEKLQLYAGAGIVQGSDPASEWQEVDKKMSTLLSLFTDVRSDLPVSEVA

SEQ ID NO: 94550 - protein, 450 aa, Photobacterium ganghwense
  REGION 1..450: note = tr|A0A0J1GZP2|A0A0J1GZP2_9GAMM Isochorismate synthase MenF OS=Photobacterium ganghwense OX=320778; GN = menF PE=3 SV=1
MTALQHAVALLQQKIRHNADHAQRFTVQLDLPAETDLIDWLESQPLFPKFYWQSRDSREEVVALGQIKTFTDPKAAEKVLASQQRIWGGRSFDGRTSRNQRCLSSFFFLPVLELSRQDDTWQLAVNVTPEQEETVLATLSKIRTEATPVADIQSKILARTFTPDFNGWSAMIDQALDAITQREFEKVVLARKTTLTLDRPVAPAQLLKASRANNRHSFHFLMALDAKHCFVGSTPERLFLRQGEALHTEALAGTIGRGQSPSEDNQLARWLLEDSKNRYENSLVVDDIVSRLRDCCQSMTVAQTPELIRLRQVQHLKRGIDARLKASVDNADLLESLQPTAAIAGLPRDKALSFIQDHEPFARGWYSGSVGFLSRERTEFCVAIRSALIMGDDLHLFAGAGIVPGSTADSEWQELDRKTSTLCSLLQASDDCDATSIPSVQCLEKERKTA

SEQ ID NO: 94551 - protein, 444 aa, Photobacterium iliopiscarium
  REGION 1..444: note = tr|A0A0D8Q982|A0A0D8Q982_9GAMM Isochorismate synthase MenF OS=Photobacterium iliopiscarium OX=56192; GN = menF PE=3 SV=1
MTALQQAVALLITKIKQASITTQRLLVKLELPANTDLIDWMAAQTLFPKFYWQSRDCREEVVALGQVKTFTDPLIAEQVITDDQRVWGGRSFDGHTDRNRRCLSSFFFLPLLEIIRLDGEWHLAANMSDDKPRMLAMLQKIEMHPEAVTDIDSRILSRSYSPDFDRWSTMIDQALTGIANNEFEKVVLARRTTLQLDHPVLPAQLLKASRGSNSNSFHFLMALDAGHCFVGSTPERLFQRHDRALQTEALAGTIGRGADSQEDQQLAQWLLADTKNRYENRLVVDDIVGRLVPQCESMNVSPVPELVQLRKVQHLKRSIDGQLNDAVLSADLLDSLQPTAAIAGLPRDAALHFIAEHEPFARGWYSGAVGYIGQQHSEFCVAIRSAMISGDDLHLFAGAGIVPGSVADSEWKELDRKTSTLCSLFEQPCSDDGKIMDKMGYKSA

SEQ ID NO: 94552 - protein, 462 aa, Photobacterium indicum
  REGION 1..462: note = tr|A0A2T3L7S1|A0A2T3L7S1_9GAMM Isochorismate synthase MenF OS=Photobacterium indicum OX=81447 GN=menF; PE = 3 SV=1
MLNDRHILQSARDDRYGAIELSEVTLTALQTAVDLLIQKIQQSSDTTQRLMVSLDLPANTDLIDWMDSQPLFPKFYWQSRDSREEVVALGQVKTFTDPMVAEKVLADDQRIWGGRSFDGRTNRNRRCLSSFFFLPQLEVIRMDGNWQLAVNLSTDKEKMVEALNKISSTAIEVAEINSHIIGRTHAPDYSGWSSMIAQALDSISNKVFEKVVLARRTTLTLDTPVAPAQLLKASRKSNNHSFHFMMALDAKHCFVGSTPERLFHRHDRDLKTEALAGTIGRGFDASEDHRLANWLMADNKNGYENRLVVDDIVNRLTPCCESMNVAQTPELIRLRKVQHLKRGIDAQLHEQVYSADLLDNLQPTAAIAGLPRDKALAFISEHEPFARGWYSGAVGFLSRQRSEFCVAIRSALIMGDDIHLFAGAGIVPGSTADSEWKELDRKTATLCSLLESDSPELERKTA

SEQ ID NO: 94553 - protein, 453 aa, Photobacterium jeanii
  REGION 1..453: note = tr|A0A178KA79|A0A178KA79_9GAMM Isochorismate synthase MenF OS=Photobacterium jeanii OX=858640 GN=menF; PE = 3 SV=1
MTALQTAVEELILKIQHASPSTHRVTVKMDLPANTDLIDWMDAQPVFPKFYWQSRDSREEVVALGQIKTFTDPMAAEKILADDQRVWGGRSFDGRSDRNRRCLSSFFFLPQCEVIRMDQAWHLAANIPAETQSRESLVKALHKFTYATTSISRIRAKVLSRSYAPDFSGWSNMIGQALDAISQKVFEKVVLARRTTLKLDNAISPAQLLKASRNSNTNSFHFMMALDAKHCFIGSTPERLFLRHHHDLKTEALAGTIGRGVSEAEDGRLAQWLLDDSKNRYENRLVVDDIVGRLNPCCQQLNVAQVPELVRLRKVQHLKRSIDGQLHEQVYNADLLDNLQPTAAIAGLPRDKALDFISEHEPFARGWYSGAVGFLSRQRSEFCVAIRSALIMGEEIHLFAGAGIVPGSTADSEWKELDRKTSTLYSLIDANLPDVCNSEHNIEQTEKWERQSA

SEQ ID NO: 94554 - protein, 457 aa, Photobacterium kishitanii
  REGION 1..457: note = tr|A0A2T3QWD7|A0A2T3QWD7_9GAMM Isochorismate synthase MenF OS=Photobacterium kishitanii OX=318456; GN = menF PE=3 SV=1
MSRIGDIELSEVILTALQQAVELLVVKIKQASVTTQRLLVKLELPANTDLIDWMDAQPLFPKFYWQSRDCREEVVALGQIQTFTDPLTAEKVISDEQRVWGGRSFDGRTDRNRRCLSSFFFLPLLEIIRFDGEWHLAANMSDDKSLMLTMLKKIATKPEVVTDIDSRILSRSYSPDFAGWSTMIEQALTGIANDEFEKVVLARRTTLQLDHPVLPAQLLKASRASNSNSFHFLMALDAEHCFVGSTPERLFQRHDRVLQTEALAGTIGRGVDSHEDQQLAQWLLADTKNRYENRLVVDDIVERLVPQCESMNVAPAPELVQLRKVQHLKRSIDGQLNNDVFSANLLDSLQPTAAIAGLPRDAALNFIADHEPFARGWYSGAVGYIGQKHSEFCVAIRSAMISGDDLHLFAGAGIVPGSVADSEWKELDRKTSTLCSLFEQPSFDNDKVMNNRGYKSA

SEQ ID NO: 94555 - protein, 445 aa, Photobacterium leiognathi
  REGION 1..445: note = tr|X0NLU7|X0NLU7_PHOLE Isochorismate synthase MenF; OS = Photobacterium leiognathi lrivu.4.1 OX=1248232 GN=menF; PE = 3 SV=1
MTALQQAVELLIAKLEQASATTQRLLVKLDLSKNIDLIDWMDTQDLYPKFYWQSRNCREEVVALGQIKTFTDPKAAEKVISDDQRIWGGRSFDGRTERNRRCLSSFFFLPLLELSRIDNDWHLAVNVGEDRDRMLTSLKQLKFDTSLISGIQSTILNRSYTPDFSGWSNMITRALDAIENKAFEKVVLARRTQLQLDKPVSPAQLLKASCANNSNSFHFLMALDDKHGFIGSTPERLFQRHEYTLQTEALAGTIGRGHDEAEDHQLAQWLLSDNKNRYENRLVVDDIVNRLVPCSQSMNVAQIPELVQLRKVQHLKRSIDAQLNDGIFSADLLDNLQPTAAIAGLPRDPALHFIAENEPFSRGWYSGAVGYIGQHHSEFCVAIRSALIIEGDVHLFAGAGIVPGSIAESEWKELDRKTSTLCSLFGQDQSSSETPEMEFKRASCN

SEQ ID NO: 94556 - protein, 450 aa, Photobacterium lipolyticum
  REGION 1..450: note = tr|A0A2T3MVE9|A0A2T3MVE9_9GAMM Isochorismate synthase MenF OS=Photobacterium lipolyticum OX=266810; GN = menF PE=3 SV=1
MSLYGAIELSEVTVIALQTAVEVLIDKVQQAPDTTQRLMVPLDLPANTDLIDWMESQPLFPKFYWQSRDSREEVVALGQIKTFTDPMVAEKVLSDDQRIWGGRSFDGRTSRNRRCLSSFFFLPLLEVIRMDGSWQLAVNLSADKEKLLLALAQVTATAKEVAGIRSTIIGRTYTPDFSGWSTMISQALDAISQKVFEKVVLARRTTLKLDTPVAPAQLLKASRASNSKSFHFMMALDEKHSFIGSTPERLFLRHERELKTEALAGTVGRGLDAREDNQLAQWLMADTKNRYENRLVVDDIVSRLVPCCASMEVAQTPELVQLRKVQHLKRGIEAQLNDHVYSADLLDNLQPTAAIAGLPREQALSFITEHEPFARGWYSGAVGFLSRQRSEFCVAIRSALIMGEEVHVFAGAGIVPGSTADSEWMELDRKKATLCSLLESDEPELERVSA

SEQ ID NO: 94557 - protein, 438 aa, Photobacterium lutimaris
  REGION 1..438: note = tr|A0A2T3IXI1|A0A2T3IXI1_9GAMM Isochorismate synthase MenF OS=Photobacterium lutimaris OX=388278; GN = menF PE=3 SV=1
MTALQKAVELLLEKIRQSTPTTQRITVKLDLPANTDLIDWMESQPLFPKFYWQSRDCREEVVALGQIKTFTDPKAAEKILADDQRIWGGRSFDGRTQRNRRCMPSFFFLPLLEIFRLDGGWNIAVNLSAESRGKVVEALAQLTLATVEVPQITSKILGRTYSPDFAGWSQMIGNALDAISQKVFEKVVLARKTTLTLDTPVSPAQLLKASRDNNHNSFHFMMALDAKHCFVGSTPERLFLRQEQDLLTEALAGTIGRGVDMAEDNRLAQWLLDDNKNRYENRLVVDDIVDRLVPRCISMNVAQTPELIRLRKVQHLKRGIDAQLNDGVENSELLDSLQPTAAIAGLPRDKALDFISEHEPFARGWYSGAVGFLGARRSEFCVAIRSALIMGDELHLFAGAGIVPGSTADSEWKELDRKTSTLCSLLASDEPDWERQTA

SEQ ID NO: 94558 - protein, 437 aa, unidentified
  source 1..437: note = Photobacterium marinum
  REGION 1..437: note = tr|L8J8E1|L8J8E1_9GAMM Isochorismate synthase MenF; OS = Photobacterium marinum OX=1056511 GN=menF PE=3 SV=1
MTALQQAVESLIEQIQTATKTTQRLVVKLDLPANTDLIDWIESQPLFPKFYWQSRDSREEVVALGQLKTFTDPMAAEKVLSDDQRIWGGRSFDGRSSRNRRCLSSFFFLPVLEIIRFDGCWQLAVNMSDDKEKILQTLAQVKPEASEISAIKSKILGRTYAPDFSGWSTMISNALEAISQKVFEKVVLARRTTLKLDTPVSPAQLLKASRGSNMNSFHFMMAMDEKHCFVGSTPERLFLRHNRDLLTEALAGTIGRSHDPSEDNRLAQWLLDDNKNRYENRLVVDDIVSRLNTCCESMNVAQTPELVRLRKVQHLKRSIDAQLNDQVYSADLLDSLQPTAAIAGLPRDKALDFISEHEPFARGWYSGAVGFLSRQRSEFCVAIRSALIMGEELHLFAGAGIVPGSTADSEWKELDRKTSTLCSLLSSEEPELERRSA

SEQ ID NO: 94559 - protein, 444 aa, Photobacterium phosphoreum
  REGION 1..444: note = tr|A0A2T3JUY0|A0A2T3JUY0_PHOPO Isochorismate synthase MenF OS=Photobacterium phosphoreum OX=659 GN=menF; PE = 3 SV=1
MTALQQAVELLVAKIKQATITTQRLVVKLELSANTDLIDWMDAQPLFPKFYWQSRDCREEVVALGQIKTFTDPLIAEKVIADDQRVWGGRSFDGHTDRNRRCLSSFFFLPLLEIIRLDGEWHLAANMSDDKPRMLTMLQKIATNPEVVTDIDSRILSRSYSPDFAGWSTMIEQALTGIANDEFEKVVLARRTTLQLDHPVLPAQLLKASRASNSNSFHFLMALDAEHCFVGSTPERLFQRHDRALQTEALAGTIGRGADNQEDQQLAEWLLADTKNGYENRLVVDDIVGRLVPQCESMNVSPVPELVRLRKVQHLKRSIDGQLNDAVFSANLLDSLQPTAAIAGLPRDAALNFIAEHEPFARGWYSGAVGYIGQKHSEFCVAIRSAMISGDDLHLFAGAGIVPGSVADSEWKELDRKTSTLCSLFEQPYFDDGTVMDNMGYKSA

SEQ ID NO: 94560 - protein, 444 aa, unidentified
  source 1..444: note = Photobacterium piscicola
  REGION 1..444: note = tr|A0A1T5I2A2|A0A1T5I2A2_9GAMM Isochorismate synthase MenF OS=Photobacterium piscicola OX=1378299; GN = menF PE=3 SV=1
MTALQQAVALLIANIKQASATTQRLLVKLELPANTDLIDWMDAQSLFPKFYWQSRDCREEVVALGQIKTFTDPLIAEQVINDDQRVWGGRSFDGHTDRNRRCLSSFFFLPLLEIIRFDGEWHLAANMSDDKPRMLAMLEKIVISPDIVTDIDSRILSRSYSPDFAGWSTMIDQALTGIANDEFEKVVLARRTTLQLDHPVLPAQLLKASRASNSNSFHFLMALDAEHCFVGSTPERLFQRHERALQTEALAGTIGRGADTQEDQQLAQWLLADTKNRYENRLVVDDIVERLVPQCESMNVAPVPELVQLRKVQHLKRSIDGQLNDAVFSANLLDSLQPTAAIAGLPRDAALNFIADHEPFARGWYSGAVGYIGQKHSEFCVAIRSAMISGDDLHLFAGAGIVPGSVADSEWKELDRKTSTLCSLFEQPCSDDVNIMDKMGYKSA

SEQ ID NO: 94561 - protein, 466 aa, Photobacterium profundum
  REGION 1..466: note = tr|Q1Z7Z0|Q1Z7Z0_9GAMM Isochorismate synthase MenF; OS = Photobacterium profundum 3TCK OX=314280 GN=menF PE=3; SV = 1
MLNDRHILQSARDDRYGAIELSEVTLTALQTAVDLLIQKIQQSSDTTQRLMVSLDLPANTDLIDWMDSQPLFPKFYWQSRDCREEVVALGQVKTFTDPMVAEKVLADEQRIWGGRSFDGRTNRNRRCLSSFFFLPQLEVIRMDGNWQLAVNLSTDKEKMLEALNKISSTATEVAEINSHIIGRTHAPDYSGWSSMIAQALDSISQKVFEKVVLARRTTLTLDAPIAPAQLLKASRKSNNHSFHFMMALDAKHCFVGSTPERLFHRHDRELKTEALAGTIGRGFDASEDLRLANWLMTDNKNGYENRLVVDDIVSRLVPRCESMNVAQTPELIRLRKVQHLKRGIDAQLHEQVYSADLLDSLQPTAAIAGLPRDKALAFISEHEPFARGWYSGAVGFLSRQRSEFCVAIRSALMMGDEVHLFAGAGIVPGSTADSEWKELDRKTATLCSLLESGQPDNESKLERKTA

SEQ ID NO: 94562 - protein, 438 aa, unidentified
  source 1..438: note = Photobacterium proteolyticum
  REGION 1..438: note = tr|A0A1Q9GND9|A0A1Q9GND9_9GAMM Isochorismate synthase MenF OS=Photobacterium proteolyticum OX=1903952; GN = menF PE=3 SV=1
MTALQTAVESLIKKIQQATQTTQRLTVALDLPANTDLIDWMESQPLFPKFYWQSRDSREEVVALGQIKTFSDPMAAEKVLSDEQRIWGGRSFDGRTSRNRRCLSSFFFLPQLEVIRLDGNWQLAVNLSADDKECTLQALSQVTPDTTEVPEIKSKILGRSYAPDFAGWSAMIGNALDAISQNIFEKVVLARRTTLQLDLPVSPAQLLKASRSRNISSFHFMMAMDAKHCFVGSTPERLFLRQERDLQTEALAGTIGRGQDLSEDDQLAQWLMDDNKNRYENRLVVDDIVSRLVPRCATMNVADTPELVRLRKVQHLKRSIGAQLNEQVYSADLLDSLQPTAAIAGLPRDKALDFITEHEPFARGWYSGAVGFLSRQRSEFCVAIRSALIMGEELHLFAGAGIVPGSTADSEWQELDRKTSTLCSLLGSDEPELERKSA

SEQ ID NO: 94563 - protein, 438 aa, Photobacterium rosenbergii
  REGION 1..438: note = tr|A0A2T3NBW7|A0A2T3NBW7_9GAMM Isochorismate synthase MenF OS=Photobacterium rosenbergii OX=294936; GN = menF PE=3 SV=1
MTALQKAVELLLEKIRQSTPTTQRITVKLDLPANTDLIDWMESQPLFPKFYWQSRDCREEVVALGQIKTFTDPKAAEKILSDGQRIWGGRSFDGRTQRNRRCMPSFFFLPVLEIFRLDGGWNVAVNLSEESRDKVTDALAQLTLDTAEVPQISSKILGRTYSPDFTGWSQMIGNALEAISQKVFEKVVLARKTTLTLDTPVSPAQLLKASRDSNHNSFHFMMALDAKHCFVGSTPERLFLRQEQDLQTEALAGTIGRGADIAEDDRLAQWLLDDNKNRYENRLVVDDIVDRLVPRCISMNVAQTPELIRLRKVQHLKRGIDAQLNDGVENSELLDSLQPTAAIAGLPRDKALDFISENEPFARGWYSGAVGFLGARRSEFCVAIRSALIMGDELHLFAGAGIVPGSTADSEWKELDRKTSTLCSLLASDEPDWERRTA

SEQ ID NO: 94564 - protein, 439 aa, unidentified
  source 1..439: note = Photobacterium sanctipauli
  REGION 1..439: note = tr|A0A2T3NXJ7|A0A2T3NXJ7_9GAMM Isochorismate synthase MenF OS=Photobacterium sanctipauli OX=1342794; GN = menF PE=3 SV=1
MTALQKAVELLIKKIQQQSNDSTQRFTVKLELPANTDLIEWMEAQPIFPKFYWQSRDSREEVVALGQIKTFTDPKAAEKVLADEQRIWGGRSFDGRSSRNQRCLSSFFFLPVVEIIRLDGSWQLAANYSAENADKIVKSLSQLNASSVELAEIKSKIVGRSYSPDFAGWSKMIGSALDAISQKVFEKVVLARKTTLKLDTPVSPAQLLKASRGSNLNSFHFMMALDSKHCFVGSTPERLFLRQERDLNTEALAGTIGRGINTAEDNRLAQWLMDDNKNRYENRLVVDDIVSRLVPRCESMTVAETPELIRLRKVQHLKRGIDAQLNESVDSADLLDSLQPTAAIAGLPREAALDFIMENEPFARGWYSGAVGFLSNRRSEFCVAIRSALIMGDDLHLFAGAGIVPGSTADSEWKELDRKTSTLCSLLGSDEPELERKSA

SEQ ID NO: 94565 - protein, 440 aa, unidentified
  source 1..440: note = Photobacterium sanguinicancri
  REGION 1..440: note = tr|A0A264TB78|A0A264TB78_9GAMM Isochorismate synthase MenF OS=Photobacterium sanguinicancri OX=875932; GN = menF PE=3 SV=1
MTALQTAVEQLIQKIQHASKSTQRLMVKMNLPTNTDLIDWMDAQPLFPKFYWQSRDSREEVVALGQIKTFTDPLVAEKILADDQRVWGGRSFDGRTDRNRRCLSSFFFLPQCEVIRMDNSWHLAVNLSEGSTVREQLIAALNKLTNSTPPISQIRSNVIGRTHAPDFTGWSNMIGDALDAISQKVFEKVVLARRTTLKLDTPVSPAQLLKASRSSNTNSFHFMMALDAKHCFIGSTPERLFMRHHLDIKTEALAGTIGRGANEAEDGRLAQWLLDDSKNRYENRLVVDDIVSRLNTCCHDLDVAKTPELVRLRKVQHLKRRIGGQLKDQIYNADLLDNLQPTAAIAGLPRDKALDFISTHEPFARGWYSGAVGFLSRQRSEFCVAIRSALIMGEEIHLFAGAGIVPGSTADSEWKELDRKTSTLCSLLNSNETEMERQSA

SEQ ID NO: 94566 - protein, 458 aa, Photobacterium sp.
  REGION 1..458: note = tr|Q2C608|Q2C608_9GAMM Isochorismate synthase MenF; OS = Photobacterium sp. SKA34 OX=121723 GN=menF PE=3 SV=1
MSRIGVIELSEVILTALQQAVKRLIAKLEQASATTQRILVKLDLPKHIDLIDWMDTQTLYPKLYWQSRNCREEVVALGQIKTFTDPKAAEKVISNEQRIWGGRSFDGRTERNKRCLSSFFFLPLLELSRLDNEWHIAVNVGEDRARIVTALQQLMFDTSLISGIHSKILNRSNTPDFTGWSNMLIRALDAIENKEFEKVVLARRTTLQLDKPVSPAQLLKASCANNSNSFHFLMALDEKHGFMGSTPERLFQRHEHAIQTEALAGTIGRGKDDVEDQQLAQWLLSDNKNRYENRLVVDDIVNRLVPCSQSMNVSQTPELVQLRKVQHLKRSIDAELNSGVFSADLLDNLQPTAAIAGLPRDPALHFIAENEPFARGWYSGAMGYISQHHSEFCVAIRSALIIEGEVHLFAGAGIVPGSVAESEWKELDRKTSTLCSLFEQETDRSLAAEMGYKSASCN

SEQ ID NO: 94567 - protein, 440 aa, Photobacterium swingsii
  REGION 1..440: note = tr|A0A0J8XXU8|A0A0J8XXU8_9GAMM Isochorismate synthase MenF OS=Photobacterium swingsii OX=680026 GN=menF; PE = 3 SV=1
MTALQTAVEQLIQKIQHASKSTQRLMVKMNLPANTDLIDWMDAQPLFPKFYWQSRDSREEVVALGQIKTFTDPLAAEKVLADEQRVWGGRSFDGRTDRNRRCLSSFFFLPQCEVIRMDDGWHLAVNLSEASSIREQLITALNKLTATTSPISQIRSNVIGRTHAPDFSGWSNMIGQALDAISQKVFEKVVLARRTTLKLDAPVSPAQLLKASRSSNTNSFHFMMALDAKHCFIGSTPERLFMRHHHDIKTEALAGTIGRGANEAEDGRLAQWLLDDSKNRYENRLVVDDIVSRLNTCCHDLDVAKIPELVRLRKVQHLKRRIGGQLNDQVYNADLLDNLQPTAAIAGLPRDKALDFISTHEPFARGWYSGAVGFLSRQRSEFCVAIRSALIMGEEIHLFAGAGIVPGSTADSEWKELDRKTSTLCSLLNSNETEMERQSA

SEQ ID NO: 94568 - protein, 444 aa, unidentified
  source 1..444: note = Photobacterium toruni
  REGION 1..444: note = tr|A0A1T4NGS3|A0A1T4NGS3_9GAMM Isochorismate synthase MenF OS=Photobacterium toruni OX=1935446 GN=menF; PE = 3 SV=1
MTALQQAVALLIANIKQASVTTQRLVVKLELPANTDLIDWMDAQSLFPKFYWQSRDCREEVVALGQIKTFTDPLIAEQVITDDQRVWGGRSFDGHTDRNRRCLSSFFFLPLLEIIHFDGEWHLAANMCDDKSRMLAMLQKIATDPEVVTDIDSRILSRSYSPDFVGWSTMIEQALAGIANDEFEKVVLARRTTLQLDHPVLPAQLLKASRASNSNSFHFLMALDAEHCFVGSTPERLFQRHDRALQTEALAGTIGRGADSQEDQQLAQWLLADTKNRYENRLVVDDIVGRLVPQCESMNVSPVPELVKLRKVQHLKRSIDGQLNDAVFSANLLDSLQPTAAIAGLPRDAALNFIAEHEPFARGWYSGAVGYIGKKHSEFCVAIRSAMISGDDLHLFAGAGIVPGSVADSEWKELDRKTSTLCSLFEQPCSDDGKSIDKMEYKSA

SEQ ID NO: 94569 - protein, 393 aa, Photorhabdus asymbiotica
  REGION 1..393: note = tr|C7BNH2|C7BNH2_PHOAA Isochorismate synthase; OS = Photorhabdus asymbiotica subsp. asymbiotica (strain ATCC 43949 / 3105-77) OX=553480 GN=phbC PE=4 SV=1
MLDLYRDALLTGFNNLNNKDFLFLSSSKSLLAQGQYAILSKPLDDAVNPDSLIQQEIGQLFQQAKNDGIENPILVGAIPFDKQQNAALFVPKKCHWFQRQQFPAPISNSIYTEKRRCQWPDKVHFSHMVNTAIDAMHNHALDKVVLSRLLDIETHQPLDSIQLLRHLNQQNSWCYNFHVPLENGALIGASPELLVRKQGNTIFSQPLAGSAKRSENPEDDHKLRQALIQSIKDNYEHRLVTDMIRNVLESRCQKLHISKMPSTISTPVLWHLATDIEGVLKAPQENALSVACLLHPTPALCGTPYQTAKNLIEKLEPFKRNLFGGIVGWCDAKGDGEWVVTIRCGEVIGSRIRLFAGAGIVPDSNPESEWQETEVKFSTMLRAFEFSQEVCPA

SEQ ID NO: 94570 - protein, 393 aa, unidentified
  source 1..393: note = Photorhabdus australis
  REGION 1..393: note = tr|A0A1C0U9V0|A0A1C0U9V0_9GAMM Isochorismate synthase EntC OS=Photorhabdus australis OX=286156 GN=entC; PE = 4 SV=1
MLDLYRDALLTGFNDLNNEDFLFLSSSKSLLAQGQYAIVSKPLDDAVNPDSLIQQEIHQLFQRAKNDGIENPVLVGAIPFDKRQNAALFVPKKCHWFQRQQFPMLISNAIYTEKRRCQWPDKAHFNHMVNTAIDAMRNHALDKVVLSRLLDIETHQPLDSIQLLRHLNQQNSWCYNFHVPLENGALIGASPELLVRKQGNTIFSQPLAGSAKRSENQEDDHKLRQALIQSVKDNYEHRLVTDMIRNVLESRCQKLHISKMPSTISTPVLWHLATDIEGMLKAPQENALSVACLLHPTPALCGTPYQTAKNLIEQLEPFKRNLFGGIVGWCDAKGDGEWVVTIRCGEVNGSRIRLFAGAGIVSDSNPESEWQETEVKFSTMLRAFEFSQEACPA

SEQ ID NO: 94571 - protein, 439 aa, unidentified
  source 1..439: note = Photorhabdus bodei
  REGION 1..439: note = tr|A0A329XCJ0|A0A329XCJ0_9GAMM Isochorismate synthase MenF OS=Photorhabdus bodei OX=2029681 GN=menF; PE = 3 SV=1
MNQIANVVADVCKTLNNEQVSEVGIQQISFPLPAGCSTYWLEWLAAQSHYPQFYWHHREGHEEVAACGQIHLFSDIALAENFLQRNRQFPQIRIWGLNAWDRIQPARITQSEAGETGYLFLPRIELRRCRDESWLYLNIAGPQDVRNAREFLQQLVPHQEFSALQAVVVNAENMPERARWSDLIEQALDTITHRKMEKVVMARKTQLELSESLAAAQFMAASRQINHCCYHFMLAFNQHEAFLASSPERLYHRKQTQLYTEALAGTVANSDDAQQAEKLGQWLLGDKKNQHENLLVVDDICQRLQDAVVSVDVAPPDVIRLRKVQHLRRRIQGKLKSASDSDCLHRLQPTAAVAGLPREAARDFIRDSELFSRDWYAGSAGYLSCEQSEFAVSLRCAQINNNLLSLYAGAGIVMGSDPQQEWIEIENKAAGLRTLLKGE

SEQ ID NO: 94572 - protein, 393 aa, unidentified
  source 1..393: note = Photorhabdus khanii
  REGION 1..393: note = tr|W3V1R8|W3V1R8_9GAMM Isochorismate synthase; OS = Photorhabdus khanii NC19 OX=1004151 GN=PTE_04186 PE=4; SV = 1
MPDLYRNTLLTGFNDLNNKDFLFLSSSKSLLAQGQYAIVSKPLDDAANPDSLIQQEIRQLFQQAKRDGIENPVLVGAIPFDKQQNAALFVPEQCNWFQRKQFPTLISNSTYTEKRRTQWPDKAHFSQMVNTAVDAMRNHRLDKIVLSRLLDIETHQPLDSIQLLRHLNQQNSWSYNFHVPLQNGALIGASPELLVRKQGNTIFSQPLAGSAKRSENQQEDYKLRQALIQSVKDNYEHRLVTDMMRNVLESRCQKLHISEMPSTISTPVLWHLATDIEGELKAPQENALSIACLLHPTPALCGTPYQTAKNLIEELEPFKRNLFGGIVGWCDEKGNGEWVVTIRCGEVNGSRVRLFAGAGIVPDSKPESEWQETEVKFSTMMRAFEFSQEACPA

SEQ ID NO: 94573 - protein, 439 aa, unidentified
  source 1..439: note = Photorhabdus laumondii
  REGION 1..439: note = tr|A0A329VGW1|A0A329VGW1_9GAMM Isochorismate synthase MenF OS=Photorhabdus laumondii subsp. clarkei; OX = 2029685 GN=menF PE=3 SV=1
MNQIANVVADVCKTLNNKQVSEVGIQQISFPLPAGCSTYWLEWLAAQSHYPQFYWHHREGHEEVAACGQIHLFSDIALAENFLQRNCQFPRIRIWGLNAWDRIQPARITQSDAGEAGYLFLPRIELRRYRDESWLYLNIAGRQDMKNAQEFLQQLVPHQEFSALQAVVVNAENVPERARWCDLIEQALDTITHRKMEKVVMARKTQLELSESLAAAQFMAASRQINHCCYHFMLAFNQHEAFLASSPERLYLRKQTLLYTEALAGTVDNSDDAQQAEKLGQWLLGDKKNQHENLLVVDDICQRLQGAVVSVDVAPPEVIRLRKVQHLRRRIQGKLKSASDSDCLHRLQPTAAVAGLPREAARDFIRDSELFSRDWYAGSAGYLSCEQSEFAVSLRCAQINNNLLSLYAGAGIVMGSDPQQEWIEIENKAAGLRTLLKGE

SEQ ID NO: 94574 - protein, 439 aa, Photorhabdus luminescens
  REGION 1..439: note = tr|A0A5C4RKU3|A0A5C4RKU3_PHOLU Isochorismate synthase MenF OS=Photorhabdus luminescens subsp. sonorensis OX=1173677 GN=menF PE=3 SV=1
MNKIANVVADVCKTLNNEQVSEVGIQQISFPLPAGCSTYWLEWLAAQSHYPQFYWHHREGHEEVAACGQIHLFSDIALAENFLHRNRQFPQIRIWGLNAWDRIQPARITQSEAGEAGYLFLPRIELRRCHDESWLYLNIAGQQDVRNAQEFLQQLVPYQEFSALQAVVVNAENVPERARWCDLIEQALEAITHRKMEKVVMARKTQLILSESLTAAQFMAASRQINHRCYHFMLAFNRHEAFLASSPEQLYYRKQTQLYTEALAGTVANSDDAQQAEKLGQWLLGDKKNQHENLLVVDDICQRLQGAVVSVDVAPPDVIRLRKVQHLRRRIQGKLKHARDSDCLHRLQPTAAVAGLPREAARGFIRDSEPFNRDWYAGSAGYLSCEQSEFAVSLRCAEINNNLLSLYAGAGIVMGSDPQQEWIEIENKAAGLRTLLKGE

SEQ ID NO: 94575 - protein, 440 aa, unidentified
  source 1..440: note = Photorhabdus namnaonensis
  REGION 1..440: note = tr|A0A1B8YK58|A0A1B8YK58_9GAMM Isochorismate synthase MenF OS=Photorhabdus namnaonensis OX=1851568; GN = menF PE=3 SV=1
MVNQIANVVANVCKTLNNKQVSEVGIQQISFPLPAGCNTYWLEWLAAQSHYPQFYWHHREGHEEVVACGQIHLFSDIVSAENFLHRNSQFPQIRIWGLNAWDRIRPARITQSKAGEAGYLFLPRIELRRYRDESWLYLNIAGRQDMRNAQEFLQQLVPHREFSALQAVVVNAENMPERAQWCDLIEQALETITHRKMEKVVMARKTQLVLSESLAAAQFMAASRQINHRCYHFMLAFNQHEAFLASSPERLYFRKQTQLYTEALAGTVANSDDVQQAKKLGQWLLEDKKNQHENLLVVDDICQRLQGAVVSVDVAPPDVIRLRKVQHLRRRIQGKLKSARDSDCLHRLQPTAAVAGLPREAARDFIRNSEPFSRDWYAGSAGYLSCEQSEFAVSLRCAQINNNLFSLYAGAGIVIGSDPQQEWIEIENKAAGLRTLLKGE

SEQ ID NO: 94576 - protein, 439 aa, Photorhabdus sp.
  REGION 1..439: note = tr|A0A329X1Z4|A0A329X1Z4_9GAMM Isochorismate synthase MenF OS=Photorhabdus sp. HUG-39 OX=2029680; GN = menF PE=3 SV=1
MNQIANVVADVCKTLNNKQVSEVGIQQISFPLPADCSTYWLEWLAAQSHYPQFYWHHREGHEEVAACGQIHLFSDIALAENFLQRNRQFPQMWIWGLNAWDRIQPARITQSEAGETSYLFLPRIELRRCRDESWLYLNIAGPQDVRNAQEFLQQLVPHQEFSALQAVVVNAEDMPERARWSDLIEQALDSITHRKMEKVVMARKTQLELSESLAAAQFMAASRQINHCCYHFMLAFNQHEAFLASSPERLYHRKQTQLYTEALAGTVANSDDAQQAEKLGQWLLGDKKNQHENLLVVDDICQRLQGAVVSVDVAPPDVIRLRKVQHLRRRIQGKLKSASDSDCLHRLQPTAAVAGLPREAARDFIRDSELFSRDWYAGSAGYLSCEQSEFAVSLRCAQINNNLLSLYAGAGIVMGSDPQQEWIEIENKAAGLRTLLKGE

SEQ ID NO: 94577 - protein, 393 aa, Photorhabdus temperata
  REGION 1..393: note = tr|A0A081S278|A0A081S278_PHOTE Isochorismate synthase OS=Photorhabdus temperata subsp. temperata Meg1; OX = 1393735 GN=MEG1DRAFT_00421 PE=4 SV=1
MPDLYRDTLLTGFNDLNNKDFLFLSSSKSLLAQGQYAIVSKPLDDAANPDSLIQQEIRQLFQQAKSDGIENPVLVGAIPFDKQQNAALFVPEQCNWFQRKQFPSLISNSTHTEKRRTQWPDKAHFSQMVNTAVDAMRNHRLDKIVLSRLLDIETHQPLDSIQLLRHLNQQNSWSYNFHVPLENGALIGASPELLVRKQGNTIFSQPLAGSAKRSENQQEDYKLRQALIQSVKDNYEHRLVTDMMRNVLESRCQKLHISEMPSTISTPVLWHLATDIEGELKAPQENALSIACLLHPTPALCGTPYQTAKNLIEELEPFKRNLFGGIVGWCDEKGNGEWVVTIRCGEVNGSRVRLFAGAGIVPDSKPESEWQETEVKFSTMMRAFEFSQEACPA

SEQ ID NO: 94578 - protein, 435 aa, Phycicoccus bigeumensis
  REGION 1..435: note = tr|A0A502CPV1|A0A502CPV1_9MICO Isochorismate synthase OS=Phycicoccus bigeumensis OX=433644; GN = EAH86_14470 PE=4 SV=1
MTSLPTPQHAPRPHGSPVVARTVALHDPGLLLSLLPDRTDPTELFSWVRRGEGLVGWGRALEFTAHGPDRFERAEAWWRDVVDGAVVRNEVSLPGTGPVAFGSISYAAGSPAGATLVVPEVVVGARDGQWWVTTIGTGDELPTPVVPRQSQPREPEGVAFADGALAPAAWAGAVERAVERITGGTLDKVVLARDLRVSAEAPIDPRWLLTRLAERYDTTWVFAVDGLVGATPEMLVRLEKGLVTSRVLAGTIRRTGDDEHDLALAASLARSSKDLEEHEYAVRSVADALRPHCSSMNVPEAPFVLHLSNVMHLATDVAGVLADRATSLTLAASLHPSAAVCGTPSAVADDLITELEGMDRGRYAGPVGWMDSTGDGEWGIALRCGAFEPDDASAMRLFAGCGIVAGSDPDSEVAESDAKLVPMRDALTTDSLTAD

SEQ ID NO: 94579 - protein, 436 aa, Phycicoccus sp.
  REGION 1..436: note = tr|A0A444BA05|A0A444BA05_9MICO Isochorismate synthase OS=Phycicoccus sp. CMS6Z-2 OX=2502783; GN = EPD83_19350 PE=4 SV=1
MTTLPADRSAHPAAAPLVARTVPLDPALAADLLALLPPGDPTSSASWVRRGEGVVGWGRAASASASGPGRFAELERWWSALAGSAVVRDEVALPGTGPVAFGSFAYSEASPAGATLVVPQVVVGRRGGRAWITTVAVGPDVAGLPGPVDVRPRPEADPPRDVAFADGALSPGDWAGAVAEAVRRITAGELDKVVLARDLEVSTGAPVDVRWLLRRLAERYDTTWVFAVDGLVGATPELLVRREKGLVTSRVLAGTIRPTGDDAHDLALAASLARSSKDLEEHEYAVRSVADALAPHCSSMNVPEAPFVLHLSNVMHLATDVTGVLDDATSSLALAAALHPSAAVCGTPTAAADAVIAELEQLDRGRYAGPVGWVDAAGDGEWGIALRSGAVDPQDPSRMRIFAGCGIVAGSDPDAELAESSAKLVPMRDALTAAPR

SEQ ID NO: 94580 - protein, 443 aa, Phycisphaera sp.
  REGION 1..443: note = tr|A0A3R7QXY4|A0A3R7QXY4_9BACT Isochorismate synthase OS=Phycisphaera sp. TMED24 OX=1986832; GN = CBB84_005525 PE=4 SV=1
  VARIANT 28: note = Xaa can be any naturally occurring amino acid
MVHMFRSRIASGPVHTHTASATDLPSAXAILQRLALGSGDGWRRLVVDLSTPLDPIQEICGRALGRRVAFKSRSGRTIAGVDAALRGDWIDDITLSALRSLMPDAAVVAWSRFDPAVESSPGWMPFGRRAWILPRLQLEVDEGRHRLVGYLLPGERPEAIEPARASLLVPRRSPVTARMFRQDEDWDFRDLVQEAIGAIRSGELEKVVLARQVSYALSEPIDAAYVLHQLASGNQYSFLVESGEHAFLGSSPERLSRRIGQRLQTEMLAGTVRARSADEAMQLLESSKDRHEHDVVVRSVTERLASIAKARKNEDQVAVVPAAGGLWHLRRQLELTLNDAVDDASVLGLLHPTPAVCGRPTNMARSHLASQEGFDRGLYAGPIGLFDGLGHDVAVAIRSLRLSPEMATLFAGAGIVRDSQPEMEFVETEAKLAVARAALPGTG

SEQ ID NO: 94581 - protein, 443 aa, unidentified
  source 1..443: note = Phycisphaeraceae bacterium
  REGION 1..443: note = tr|A0A520Q663|A0A520Q663_9BACT Isochorismate synthase OS=Phycisphaeraceae bacterium OX=2026777; GN = EVA77_06980 PE=4 SV=1
MIHMSRLRIASGPVHTHTASATDLPSALAILHRLALGSGDGWRRLVVDLPAPLDPIHEICGRALGRRVAFKSRSGRTIAGVDAALRGDWIDDITLNALRGLMPDAAVVAWSRFDPAVESSPGWMPFGRRGWILPRLQLEAHDGCQRLVGYLLPGERPEAIEPARASLLVPRRSPVTARMYRQDEDCDFRNLVQQAIGAIKSGDLEKVVLARRVSYALSEPIDAAYVLHQLASGSHYSFLVESGEHAFLGASPERLSRRVGQRLQTEMLAGTVRARSADEAMQLLASSKDRHEHDVVVRSVTERLTPIAKAKKSEGQVAVVPAAGSLWHLRRKLELTLNDAIDDASVLGLLHPTPAVCGRPTNMARSHLSTQEGFDRGLYAGPIGLFDGSGHDVAVAIRSLRLSPQMATLFAGAGIVRDSQPEMEFVETEAKLAVARAALPGTG

SEQ ID NO: 94582 - protein, 432 aa, unidentified
  source 1..432: note = Phytobacter diazotrophicus
  REGION 1..432: note = tr|A0A4V2WCP2|A0A4V2WCP2_9GAMM Isochorismate synthase MenF OS=Phytobacter diazotrophicus OX=395631; GN = menF PE=3 SV=1
MLSISVALEQLREKLSGIDANSPGFYVFDVAFALNDAFDPLTFLASQPCFPQFYWQQRSGEDEAAALGQVLRFPSLAEARHFLNDNPEHDLRVWGLNAFDPQQGELFLPRLEWRREGGRASLRIIVLNGNAQQNDVAQARSFIDALVRAKSLPDVQMELVSQHHFPQQSGWEALVTQATQAITRGEMDKVVLARATDYHFSQPVNAAAVMAASRRLNHHCFHFFIAFDPHNAFLGSSPERLWRRRGTSLRTEALAGTVANDTDDTRATELGDWLMNDDKNQRENMLVVEDICQRLQHATSTLDVLPPQIVRLRKVQHLRRCIWTEMHHNDDAQCLTLLQPTAAVAGLPRLAARAFITQHEPFEREWYAGSAGYLSLKQSEFCVALRCAKISGTTVRIYAGAGIVAGSDPTMEWQEIENKAAGLRSLLIMKHV

SEQ ID NO: 94583 - protein, 432 aa, unidentified
  source 1..432: note = Phytobacter ursingii
  REGION 1..432: note = tr|A0A508U7K2|A0A508U7K2_9GAMM Isochorismate synthase MenF OS=Phytobacter ursingii OX=1972431 GN=menF; PE = 3 SV=1
MHSISVALEQLREKLAGIDANSPGFYVFDVAFALNDAFDPLTFLASQSCFPQFYWQQRSGEDEAAALGQVLRFTSLAEARHFLDDNPEYDLRIWGLNAFVSQQGELFLPRLEWRREGGRAFLRLIVINDAAQRGDAAQARAFIDALVRAKSLPDVQMELVSQQHCPEQSGWEALVTQATQAIARGEMDKVVLARATDYRFSQPVNAAALMAASRRLNHHCFHYFIAFDPHNAFLGSSPERLWRRRGTSLRTEALAGTVANDTDDTRAAELGNWLMNDDKNQRENMLVVEDICQRLQRAAATLDVLPPQIVRLRKVQHLRRCIWTEMRHKDDAECLTLLQPTAAVAGLPRQAARAFITQYEPFAREWYAGSAGYLSLKQSEFCVALRCAKISGATVRLYAGAGIVAGSDPTMEWQEIENKAAGLRSLLIMKHA

SEQ ID NO: 94584 - protein, 407 aa, unidentified
  source 1..407: note = Pigmentiphaga aceris
  REGION 1..407: note = tr|A0A5C0B2R6|A0A5C0B2R6_9BURK Isochorismate synthase OS=Pigmentiphaga aceris OX=1940612 GN=FXN63_25600; PE = 4 SV=1
MNAPVPSVAAAGPAADSWFANYRADDYLFVSPTASVLGRDAALTLAPGPEPLWQRAADLLAEAQNSGIAAPVLIGAVPFDASRPARLVVPRQCQLDGPLDRRSMKPAAKTSIATPITMTSVPPEEGYEAAVTDALERFAARELDKVVLARTLDITLTSPPDRPMLMRSLLQRNPHGFTFAIPLDDSQTDAGNPPVFLGASPELLLRRQGRRVILNPLAGSAARQADPVADRAAADALLASAKDRHEHAIVIDSIAAALRPYCRDLRLPDGPTLTSTDALWHLSTWIEAELDDPAVSSLELALALHPTPAVCGHPTGAAFAAIHDLEPFDRGFFAGLVGWCDAQGDGEWAVSLRCAESDGASLRLYAGAGVVPGSEPARELAETGVKFRTMLAALGLMTSQQPASGRD

SEQ ID NO: 94585 - protein, 462 aa, Piscibacillus halophilus
  REGION 1..462: note = tr|A0A1H9JIG4|A0A1H9JIG4_9BACI Isochorismate synthase MenF OS=Piscibacillus halophilus OX=571933; GN = menF PE=3 SV=1
MLQTKPFTINEQLNKAKEYMDTVNQTQLMVSLVEKVNFINPVQFFSYYQNQDLLRLFWRDSEDSFYLVGIGNYKTIQSHQNRFHSVQQQWEGLLTDFFIPNDSVKGTGPLMLGGFSFNDSVMDDKWKTFQSGLMVVPEAMLTVIQGECYMTYNVTVNENTDVDALTTKLKQWTENINDQYESNVPQQLQTTNSLDYRNWEQLIRDAVNRIKNGTLGKVVLARELEAEFNQSIDLNNVLKKLVEQQKDSFIYIFDYGDDAFISATPERLVKVDENELLSTCLAGTIKRGDSLKEDDLLAQSLLNDEKNRSEHQYVVSMIKEAIEPLTHSIDLPSQPEILQLRTLQHLYTPVTAILKDSYTIFDLIEKLHPTPALGGEPRQAAVMFIKENEPFERGWYAGPVGWIDAHGNGEIIVAIRSALINQNKATLFAGCGIVEESDPYEEYEETKLKFTPMLEALGGISR

SEQ ID NO: 94586 - protein, 472 aa, unidentified
  source 1..472: note = Planctomycetaceae bacterium
  REGION 1..472: note = tr|A0A424K2E7|A0A424K2E7_9PLAN Isochorismate synthase OS=Planctomycetaceae bacterium TMED241 OX=1986836; GN = CBE01_000650 PE=4 SV=1
MPADSRFYDLLSAAESGWRDRSGDDGLLSLALPLDGIDPMWALTGLAGEQTFRMLWDCAPGLSLAAAGRCQQLELAGSRRFELAQRFSDLTLGRLVDGRPDCPPQARPRVLLSFSFFDQTTGHQQDPMTVPSVQAVLPCWQLSRQGRRGWLRINGVVTDAADARHLAERLWLKATDLEESRPVEPVDKAEPLWSRHAALPWQDQYSGALHRALELVNGGDLHKLVLAVRQSIDLTQPFDPLPLLSRLRRQQAGSCRFLWQREAGNVFFGASPERLLSLRGGCLRSDALAGTAGHGDDGQQLLQSDKDRREHELVVETITDQLRQAGLTPWRRRQPQLARHGRLTHLHTPITAETGGLSALALADQLHPTPAVAGLPRREAMAWLRTLEPFERGGYAAPFGWIDSAGDAELRVAIRCGHARGQRLDLTAGAGLVRGSIAERELQEVGLKLAVLADQLDWSSDAQSSPRSRSIT

SEQ ID NO: 94587 - protein, 470 aa, unidentified
  source 1..470: note = Planctomycetales bacterium
  REGION 1..470: note = tr|A0A1W9TET5|A0A1W9TET5_9BACT Isochorismate synthase MenF OS=Planctomycetales bacterium 4572_13; OX = 1971638 GN=menF PE=3 SV=1
MKTDDYIFSRESVREWVTDKIAATFTPVDRRSGQLLSFSCMFDSLCIMDWLIAQNNPVKMYWSSRDAHLEIAAVGLADTVDPKRASCLDGALAGIEKNLVNGSVDIRYYGGICFDMTDSETAAWEGLGPYYFFVPKFELRQENDQSVFLFNVLAMPQDDVASITERFLESLDSLSFDSNTSPESLTDKSRLPSVLRRSDRPDQDRWQKQTREMIDLIQADRIKKIVQTRITSLELSETPDPLHLLNCVKSRSVNTYDFCFQIDTEQSFIGCSPERLYKKEGNSIWSEALAGTNVRVADHELNGQLQKELLESQKEIEEHEYVFENIKSELEKICSKVEVVDKREVLPLKHIQHLRSRFSGTLKKGIDNGDILRDLHPTAAVNGYPKKAALALICQYENFSRGWYAGPVGWIGRGRSEFAVAIRSAHITSQRIRLFAGAGIVSASYPGREWEETEMKMAPFLDLFEPSLKS

SEQ ID NO: 94588 - protein, 457 aa, unidentified
  source 1..457: note = Planctomycetes bacterium
  REGION 1..457: note = tr|A0A3L7T0E8|A0A3L7T0E8_9BACT Isochorismate synthase OS=Planctomycetes bacterium OX=2026780; GN = DWI09_12310 PE=4 SV=1
MSTGSFHRPATADDSLSVVQRSAIALAARIEATQLPGVGRFVRIESEVEPTDLLQWLRSAPAGDRRYFRDRSAKFEIASVGIAAACTFGEHVDWQQDVVAASSERASAWFVSLPFDAVRMRDGAWKRFCQHSCVLPEFELRRHGEQHALAVHLTASTDRAALAARMRQIARNAGSGATACVVEPALVRQPDGTAEADWSRAVNAALERIRTGAMRKIVLARTRRYIASGALDPVAVLTRLASREARGFRFLVEAGEGHAFLGVTPERLVSRSGRVARSEAVAGTRPRGVDGVADRLLGESLLASAKDRREHDLVVERVRDALAGCSTSLRTESEPRLLRLAYVQHLALRVQGDLRVGVSDRDLVNALHPTPAVAGAPVAEAIVALRDFEPFDRGLYSGPIGVVSRDGAEIAVAIRSARIEGNALTAFAGAGIVEGSDPAEEWRETGHKLLAFERLAT

SEQ ID NO: 94589 - protein, 498 aa, Planktothrix agardhii
  REGION 1..498: note = tr|A0A073CB16|A0A073CB16_PLAAG EntC OS=Planktothrix agardhii NIVA-CYA 126/8 OX=388467 GN=entC PE=4 SV=1
MFIFYMPVFPSATPLLQDRQELHRFLLEFQNYGLQDYQTKILSIAHEIQWIDPLAILQQFYHPNLIHFYFEKPQFEESFVAVDTAIKFITAGKNRFIEAQKFIQSCLDKTVIIGSKNSHLPKPYFCCSFTFFDQYFNPNLSLNCGQNLAVEPENVYFPPATIFLPKWQVIRKKNRCILIVNIVLKKNSKIENILSDVWYKSQQINGLETTSIPSVTSKTPSLLLTQQVETDPKPYLQFKQSVHSALDLINSKSLKKLVLSQPIDVVSKTPFNLIHSLNNLRLLYPDCYIFSTGNGKGQQFIGASPERLISLKNNQLITDALAGSAPRGKTPIEDINLGQELLNSEKNLREHQVVIDFIIERLLSLGLTPDLTDLPCLRQLTNIQHLWTPIKCQVSTNIHLLEILSQLHPTPAVAGTPRDIAQQYIHNYESFDRSLYAAPIGWIDHQGNGEFVVGIRSALLDGNRARLYAGAGIVAGSEPEKEVAEIQLKLQALLRALV

SEQ ID NO: 94590 - protein, 493 aa, unidentified
  source 1..493: note = Planktothrix rubescens
  REGION 1..493: note = tr|A0A1J1L7K1|A0A1J1L7K1_PLARU Isochorismate synthase OS=Planktothrix rubescens OX=59512 GN=PLAN50387; PE = 4 SV=1
MPVFPSATPLLQDRQELHRFLLEFQNYGLQDYQTKILSIAHEIQWIDPLAILQQFYHPNLIHFYFEKPQFEESFVAVDTAIKFITAGKNRFIEAQKFIQSCLDKTVIIGSKNSHLPKPYFCCSFTFFDQYFNPNLSLNCGQNLAVEPENVYFPPATIFLPKWQVIRKKNRCILIVNIVLKKNSKIENILSDVWYKSQQINGLETTSIPSVTSKTPSLLLTQQVETDPKPYLQFKQSVHSALDLINSKSLKKLVLSQPIDVVSKTPFNLIHSLNNLRLLYPDCYIFSTGNGKGQQFIGASPERLISLKNNQLITDALAGSAPRGKTPIEDINLGQELLNSEKNLREHQVVIDFIIERLLSLGLTPDLTDLPCLRQLTNIQHLWTPIKCQVSTNIHLLEILSQLHPTPAVAGTPRDIAQQYIHNYESFDRSLYAAPIGWIDHQGNGEFVVGIRSALLDGNRARLYAGAGIVAGSEPEKEVAEIQLKLQALLRALV

SEQ ID NO: 94591 - protein, 493 aa, Planktothrix sp.
  REGION 1..493: note = tr|A0A1T4ZBI6|A0A1T4ZBI6_9CYAN Isochorismate synthase OS=Planktothrix sp. PCC 11201 OX=1729650; GN = PL11201_170018 PE=4 SV=1
MPVFPSATPLLQDRQELHRFLLEFQNYGLQDYQTKILSIAHEIEWIDPLEILQQFYHPNLIHFYFEKPQFEESFVAVDTALKFTTAGKNRFFEAQKFIQSCLDKTVIIGSKNSHLPKPYFCCSFTFFDQYFNPNLSLNSRQNPSGEPENVYFPPATIFLPKWQVIRKKNRCILIVNIVLKKNSKIENILSDVWYKSQQINALKTTLIPSVTSKTPSLLLTQQVETDPKPYLQFKQSVHSALDLIKSKSLKKLVLSQPIDVVSKTPFNLIHSLNNLRLLYPDCYIFSTGNGKGQQFIGASPERLISLKNNQLITDALAGSAPRGKTPIEDINLGQELLNSEKNLREHQVVVDFIIERLLSLGLTPDLTDLPCLRQLTNIQHLWTPIKCQVSTNIHLLEILSQLHPTPAVAGTPRDIAQQHIHHYESFDRSLYAAPLGWIDHQGNGEFVVGIRSALLDGNRARLYAGAGIVAGSEPEKEVAEIQLKLQALLRALV

SEQ ID NO: 94592 - protein, 463 aa, unidentified
  source 1..463: note = Planococcus salinus
  REGION 1..463: note = tr|A0A3M8P4E3|A0A3M8P4E3_9BACL Isochorismate synthase OS=Planococcus salinus OX=1848460 GN=EEX84_15200; PE = 4 SV=1
MNSQPYSSTSNSMDTRYSAYRFYTETIEISPLSALAFFEAGGKGHNGKRMFWQNREKTFTFVGLGHAHVLSASDYYGRFEDIKQQWQSLCQQIVNEEPEVQPILFGGFSFDPLNDYESEWIHFPDAYFVVPSFQLTLKEDRAYVSIHLISTKQDTFGEFEALRKERDQLIHAAQVSELASYEKPLVIERQEIKKQQYMESIKKVTEVIKAEQAEKVVIARAMKLTFEQHLPSSSALYQVSKEQPESFLFGLEAEDQFFFGATPERLVKVEDQQALSTCLAGSIPRGKTVEQDTELGNELLNDPKNRSEHQYVVNMISQVFAEHCASMYIPKQPKLMKIRDIQHLYTPVEGKLTDGSTLFDLVKDLHPTPALGGEPKEEALSLIRQYETMNRGYYAAPVGWIDANGNGEFAVAIRSALLNEQDAFLFAGGGIVADSTPESEYAETWVKFRPMLRALGGQLSDES

SEQ ID NO: 94593 - protein, 463 aa, Planococcus sp.
  REGION 1..463: note = tr|A0A5C5T5R7|A0A5C5T5R7_9BACL Isochorismate synthase OS=Planococcus sp. CPCC 101016 OX=2599617; GN = FQV26_12065 PE=4 SV=1
MNSESSSSTQQFAAGPYEGYRFYTETIEVARMSALAFFEAGGNDHKGKRMYWQNREKTFTLVGIGHAHVLSTNKTNGRFEKIKEDWTSLCRQIVNEEHSVQPVLFGGFSFDPLNGKSSEWTKFPQAYFAVPTFQLILKGEQAFVSIHLITEKQESFAEFDAMRKERDKLIHAAQVSEVDKYDKPRATGRTELRKEEYLASIQQVTDIIKAKEVEKVVIARALRLEFEHKLSPASALYQVSNEQPESFLFGLEAEEQFFFGATPERLVKVEDQKALSTCLAGSTPRGKTVEKDMELGEALLKDPKNRAEHQYVVKMISEVFEANCSRTVVPKLPKLMKIRDIQHLYTPVEGKLNPDATLFDLVEVLHPTPALGGEPKLEALHMIREHEAMNRGYYAAPIGWIDAKGDGEFAVAIRSALLDGEKAYLYAGGGIVADSTPESEYDETWVKFRPMLRALGGQLSDES

SEQ ID NO: 94594 - protein, 463 aa, Planomicrobium glaciei
  REGION 1..463: note = tr|A0A518XPK5|A0A518XPK5_9BACL Isochorismate synthase OS=Planomicrobium glaciei OX=459472; GN = FK545_14285 PE=4 SV=1
MNPQQYSSIEQYADTRYSAYRFYTETIEVSRMSALAFFEAGEKQYKGKRMFWQNREKTFTLVGLGHAHVLASSVQQGRFEEIKHKWESLCKQIVNEEPDVEPILFGGFSFDPLNELESEWTHFPEAYFAVPSFQLVIKDDQAYVSINLITAEKETFNQFELMRKERDRLIHAAQVLELPKYQKPLVMGRTEIKKEQYLDSIDKVTAIIKAEQAEKVVIARSLKLNFEEPLSASSALYQVSEEQPESFLFGMEAETQFFFGATPERLVKVKESQALSTCLAGSTPRGKTMEKDMELGEALLNDKKNRSEHQYVVDMISEVFNGHTSRLTVPNVPKLMKIRDIQHLHTPVEGELNSGSTLFDLVRDLHPTPALGGEPKQEALDIIREYETMNRGYYAAPVGWIDAKGDGEFAVAIRSALLNEKEAYLYAGGGIVEDSTPESEYDETWVKFRPMLRALGGLLSDES

SEQ ID NO: 94595 - protein, 463 aa, Planomicrobium sp.
  REGION 1..463: note = tr|A0A5C5UM73|A0A5C5UM73_9BACL Isochorismate synthase OS=Planomicrobium sp. CPCC 101110 OX=2599619; GN = FQV30_11760 PE=4 SV=1
MNSQPYSSTEKYEDTRFLAYRFYTETIEVTGMSALAFFEAGKASFKGQRMFWQNREKTFTLVGVGHAHTLSTVNHHGRFEDIQKDWQSLCKQIVNEERSVQPVLFGGFSFDPLNKQQSEWVRFPQAYFAVPSFQLVIKNDRAYVSIHLITKEEETFNEFEALRKERDKMIHTAQVSELAAYNKPIVSGRQELKKEQYMESIKKVTAIIKAKQAEKVVIARTLKLKYKEALSPASALYQVSKEQPESFLFGLEAEDQFFFGATPERLVKVENRQALSTCLAGSTSRGKTVEQDTELGEELLRDRKNRSEHQYVVAMISKVFAEHCRETLVPKMPALMKTRDIQHLHTPVKGELKAGSTLFDLVRDLHPTPALGGEPKQAALSLIRQYETMNRGYYAAPIGWVDAGGNGEFAVAIRSALLNEKEAYLYAGGGIVEDSTPESEYLETWIKFRPMLRALGGQLRDES

SEQ ID NO: 94596 - protein, 404 aa, Plantibacter sp.
  REGION 1..404: note = tr|A0A3G8VF34|A0A3G8VF34_9MICO Isochorismate synthase OS=Plantibacter sp. PA-3-X8 OX=2480625; GN = EAO79_00595 PE=4 SV=1
MVAQTVAIDDPRQLLPFADQTSPLLWVRKGYGLVGLGEALRLEFSGPDRFTRAAAAWRDVCAAAVVTDEVRRPGTGLVAFGTFAFDDESSATSVLIVPRTIIGRYPDASFITRVSLGDGAEDVDPATTAYGPEYRIQLTPGVQSREGYLDSAERAIARIQAGGLSKVVLARDLAGHLPAEADRRRVLHDLALGYPDCWTYAVDGFIGSSPETLVRVDRGAVSARVLAGTISRGPDAESDHDQAVALMTSAKDQGEHQFAVQSVLTALQAHSPQLRRSEVPFTLKLPNLWHLATDIDGRLSDGSSSLDLMDGLHPTAAVAGTPTRDAVALIRELEPFDRGRYAGPVGWVDASGDGEWAVALRCAQIAPDGDITAYAGCGIVADSDAATELVETKMKFRPIVEAFG

SEQ ID NO: 94597 - protein, 453 aa, Plesiomonas shigelloides
  REGION 1..453: note = tr|A0A2P1VTT1|A0A2P1VTT1_PLESH Isochorismate synthase MenF OS=Plesiomonas shigelloides OX=703 GN=menF; PE = 3 SV=1
MPRLRQLFCGPADNAVPDVTHSDSSSAALPDSPGIRQFTFSMLRRDAGKLLDWLSAQPLFPKFYWLHRDGSEEVAALGQVRVFNRPDAVSEFLQAQSEPLRVWGGTAFDGLQARSHGCLSGWFFLPRFELRQTTKGAWLTINLHSHTSLREDGLQAWQQLCQLVASSALNLPDVTVEQARHAPDKAGWFALIRKSLAAIEAREFDKVVLARKTTLTLDKPVAPAELLAASRRVNHRCFHFMLALDDSHGFVGSSPERLFRRSGQTLYTEALAGTVSRTGDDIQDHQLAQWLLSDKKNQHENLLVVEDICSRLSGHVDNLDVLPAEVLALRKVQHLRRRITAQLRQADDAQCLTWLHPTAAVAGLPREPARRFIHEHEPFERGWYAGSVGHISRERAEFTVAIRSALIQQNQVHLFAGAGIVPGSDPEAEWQEIERKAAGLRTLLEPDYVNKCL

SEQ ID NO: 94598 - protein, 479 aa, Pleurocapsa sp.
  REGION 1..479: note = tr|K9SYB0|K9SYB0_9CYAN Isochorismate synthase family protein OS=Pleurocapsa sp. PCC 7327 OX=118163; GN = Ple7327_0138 PE=4 SV=1
MSAAVPVVPFRANHLSTNERELQQFLLGLQEKSPRKYKTQIVSFSLQLDPIDPLSVLAAIARSDRTHFYWENAAREEAILGFEVAKSFTINSGDRFAKSQKFIEECLDRTVRIGDLCLPGSGPYLFCSFTFFESQQNDPSPFPRATVILPSYQIVRKKQDCTLVINLAIDRDAELQDLLRAIQNKIKAFIQSANDLAPNRSSDRNQVIKQEVTFQSLENFRSSVAHALKSIQEKQFSKIVLAHSLDVTSDAPFQIVESLNNLRQIYPDCYIFSLANGRGHHFIGASPERLLSVRDGELITDALAGSAPRGKNVTEDDCFAKKLLRSEKEKREHKAVTEFITERLSQLGLKPQRSPLKLLKLSNIQHLWTPIYAKLPSNIHPLEIVAKLHPTPAVAGVPTEIACEQIRQYESFNRGLYAAPIGWINYQGNGEFIVGIRSASIEKNRARLYAGAGIVSGSDPDKEMAEIQLKFQALLKALL

SEQ ID NO: 94599 - protein, 430 aa, unidentified
  source 1..430: note = Pluralibacter gergoviae
  REGION 1..430: note = tr|A0A251ZHR5|A0A251ZHR5_PLUGE Isochorismate synthase MenF OS=Pluralibacter gergoviae OX=61647 GN=menF; PE = 3 SV=1
MYSLSAALDNLRVLLNDELPDAPGLRVFDLAVTLKDACDPLSWLCVQPLYPQFYWQHRDDNEEVAAIGAACRFTALAEARDFLQRQARPDLRIWGLNAFAQEQGQLFLPRLEWRRDAGRSALRLTLYSASSLRDDARSALTLLDALRPERPLPALALDLTRERHLPERAGWQRLIEQATGAIADGALQKVVLARASDLSFTAPPGAGPLMAASRRRNLNCYHFMMAFGPQQAFFGSSPERLWRREESLLWTEALAGTAASHPDPRRAQGLADWLMSDEKNQRENLLVVEDICQRLGDEVSELKVAPPEVIRLRKVQHLRRKVQGRLRRPDDLLCLRQLQPTAAVAGLPRRAAREFIARHEPFEREWYAGSAGYLSLRGSEFCVALRSARLSDNVLRLYAGAGIIAGSDPQQEWQEIENKAAGLRTLLFEQ

SEQ ID NO: 94600 - protein, 320 aa, Polaribacter sp.
  REGION 1..320: note = tr|A0A395K0W1|A0A395K0W1_9FLAO Isochorismate synthase OS=Polaribacter sp. WD7 OX=2269061 GN=DUT90_08945; PE = 4 SV=1
MKEETLFFTSDFTESGFVFSPFDAEENTVLFPVDKADFLQEKIERLDNFEFFNRYTDDESEKEAHINLVDKTILKIKNSSLQKIVISRKELILLKDFDVLLLFKKLLKQYKAAFVYVWYHPKIGLWFGATPETLLHISNQRFKTMSLAGTQLLQENTAVAWGAKELEEQQLVTDFIVNQLKPITTSLKVNQKETVQAGSLLHLKTKVEGEVKSNSDLKQLIRALHPTPAVCGLPRKEAFVFITENEPYKRDFYTGFLGELNLESNLDKSKLSKLYVNLRCMRIDGKMASLYVGGGITKDSNAFKEWTETVSKSKTMKTVL

SEQ ID NO: 94601 - protein, 469 aa, Polyangium fumosum
  REGION 1..469: note = tr|A0A4U1JC83|A0A4U1JC83_9DELT Isochorismate synthase OS=Polyangium fumosum OX=889272 GN=E8A74_20895; PE = 4 SV=1
MSSGLGADLLARLSRATRRGAGSAGELVAVVAPAPVVPAARLVDACTSAAPIVLFQAPPREGEEPIGVVGFGEVARVEGSGPERLAQITSAARRIFATLREERDADAGGAPGPRFVGGLSFRTEARHVPPWTAFADASFSLARWMYVTRPGEAWLWLLVRDGDLAPERSAIEAELASIEAVFVIAAQPAQDALPRGAGEGARIEGTSREAFCSLVREALDAIRAGEIDKVVPVAATRVRPVRPLDARVALSRLAEAYAETTRFAVQRGEHVFLGASPERLISRRGRVVRTDGLAGTVRRGVDDASLVQALLANPKERREHALVVEAIAAVLGPRCDTLDVPDAPSIRSLPNVHHLWTPIRGALRDDTHVLALVEALHPTPAVSGTPREQATAWIATHEPDARGWYTGAVGWFDAAGDGDFSVAIRAGLVSPDEAWLYAGAGIVEGSDPPAEYAETRAKQAPMLAALGIQ

SEQ ID NO: 94602 - protein, 467 aa, Polyangium sp.
  REGION 1..467: note = tr|A0A4V5PHG0|A0A4V5PHG0_9DELT Isochorismate synthase OS=Polyangium sp. SDU3-1 OX=2567896; GN = E8A73_27110 PE=4 SV=1
MSSSFVARALEAATRQRAPAEIIAITVPAMPVAPDRLLVARGADDAPILFWDASAREREGGGALAGWGEAARVEGSGPERLRQVIAEAERLFAQVFEVRHPEAEGAPSPRLFGGLSFRPEPRREAPWAAFGDASFVLPRLRYAVRGGRGSLQLCARVEDLLREDRRAVIVADFERAQEAITAAGRGVPMHREGGAGDARIEGMTSAAFCELVEAALAHIRSRALEKVVAVAPSHVTSSRAIDIGAALVRMGEDYGDCTRFAIQRGDAVFVGASPERLVARSGRVVETDGLAGTARRGANEEAIKDALFTSAKERREHAIVVEAIARVLESATTALDVPAEPVIRTLRNVHHLWTPIRATLRAPLHVLSLVESLHPTPAVCGTPREDAVAFIAQNEPSGRGWYTGAVGWLDGAGDGDFAVAIRAGLVGAREAWLYAGAGIVEGSDPRSEFAETRAKQAPMLTALGIGA

SEQ ID NO: 94603 - protein, 462 aa, Pontibacillus chungwhensis
  REGION 1..462: note = tr|A0A0A2VDI1|A0A0A2VDI1_9BACI Isochorismate synthase MenF OS=Pontibacillus chungwhensis BH030062; OX = 1385513 GN=menF PE=3 SV=1
MIETTSFYHEKLYKALSNRKHIDTPQLISVTTKLDSVDSLGFFQAGKVYQGERVYWTSADTMFTLVGVGSAYTFEAEQDRFFSTRQMWNDVLAEAIIDNPYRIPGTGPVALGGFSFDPLKEENGTWKDFPNSKVLIPMYLLTEWRDETYLTINMMIHPDDNEDELFGHVTEEYQSLLAGTFIHDDDVTVTNQEEVRPEEFKEIVAKATDHIKSNRLGKVVLAREMIVSFSDDRKASSVIRQLKEEQTQSYIFAFESGDSCFVGATPERLVKVEDNELLSTCLAGTVPRGNTPKEDVALGEALIHDEKNLQEHDFVVQMIKKAVTGCCENVHVPNSPVLYPLRNLQHLYTPVSGTLKEGVSLLEVVEKLHPTPALGGYPREDSLQFIRDYEPFHRGWYASPVGWFDSYQNGEFAVAIRSALLKKDQAILFSGCGVVEDSDPDEEYKETAVKFLPMIHALGGRE

SEQ ID NO: 94604 - protein, 463 aa, Pontibacillus halophilus
  REGION 1..463: note = tr|A0A0A5G8R3|A0A0A5G8R3_9BACI Isochorismate synthase MenF OS=Pontibacillus halophilus JSM 076056 = DSM 19796 OX=1385510 GN=menF PE=3 SV=1
MIKVKSKYFLNKLYEALNTIQSERTPQLISVSAPIEHLNVFGFYQAGAHYAGSRSFWMNADRSLTLVGVGSAYTIEAKSDRFKAIETEWSKILEDADIHNQSDVPGTGPVLLGGFSFDPNRTGSEKWSNFPDSKFSVPMFLLTEYQEQSYLTVNVLVQKEDHLEQLYAHLTQEMNHLLEHDLYKEVKPTVTGTQEINPSQWKETVHKATMQIREGFMDKVVLARELKAQFSHPCSVATLLESVTEQQPQSFVFAIESGGDCFFGATPERLVKVNQGEVLSTCLAGTAPRGETLAEDEQLGQDLLHDQKNLQEHEFVVQMIRKAIESCSTDVEIPAGPVLYPLRNVQHLYTPVKGNLKQGSSLLSVVERLHPTPALGGFPRAEAMSFIRAEEDMDRGWYAAPVGWLDGKSNGEFGVAIRSALLSENEAYLYAGCGIVADSDPEAEYEETAIKFSPMLHVLGGSQ

SEQ ID NO: 94605 - protein, 460 aa, Pontibacillus litoralis
  REGION 1..460: note = tr|A0A0A5G0V9|A0A0A5G0V9_9BACI Isochorismate synthase MenF OS=Pontibacillus litoralis JSM 072002; OX = 1385512 GN=menF PE=3 SV=1
MVVIHTTSKLYNTLHDVMENIKPVMQKQLVSITTKVDNANSFAFYQAGTTNQGTRFYWASADRTLTLVGIGETVAFESDDNGFDAVHHSFGQLLENAAIYNDYEASGTGPIAFGGFAFDPLKEGSVTWGDFPNSSMVIPTYLLTIVHQESYLTINALVEPGESLEPYIAQSVQFMESTFQREQMPYLIQQEEVAPEEWKQIVKDATEDIKRGVIDKVVLAREMIATFSENIPISSLLNVLSEQQHQSYIFAFERGMSCFVGSTPERLVKVEQRSLLSTCLAGTISRGQTQEEDEQLGSYLLHDEKNLQEHDFVVQMIKQAVELCCDDVVVPDGPILYPLRNLQHLYTPVKGKLQQGYTILDVVQRLHPTPALGGYPVEASIEFIRDKEPFHRGWYAAPIGWFDPKDNGEFAVAIRSALLYQNQATLFAGCGVVEDSQPEVEYEETAIKFSPMLQALGGLQ

SEQ ID NO: 94606 - protein, 462 aa, Pontibacillus marinus
  REGION 1..462: note = tr|A0A0A5FZM4|A0A0A5FZM4_9BACI Isochorismate synthase MenF OS=Pontibacillus marinus BH030004 = DSM 16465 OX=1385511 GN=menF PE=3 SV=1
MIKTTTHYNERLYKALSQIHHIETPQLISVTEQMATANPFRFYQAGKAYQGERVYWTSTDQVFTLVGIGSAYTLEAEEDRFNTIQQAWKALMEEAVIDNPYESSGTGPVALGGFSFDPHDHSRTAWEDFPDSKVSIPMFLLTKTESANYITVNIMVHPEDDIEDIYQFVTQAYQEFLEGGTSIDEMPSIIGKEEIQPLEWKDIVKQAAHDIQSGYMSKVVLARELEVNFDRDVNIVSVLDALQREQQQSYVFAVESGDSCFIGATPERLVKVDNRELHSACLAGTIARGDTVEEDQALGEELLHDNKNLQEHDFVVQMIREAVESCCDQVQIPSEPVIYPLRNLQHLYTPVKAKLRVGYTILEVVEKLHPTPALNGYPRQEALSYIREHEPFDRGWYASPVGWFDYKDNGEFAVAIRSGLVKKNKTVLYSGCGIVEDSMPEAEYEETAIKFLPMLNALGGRT

SEQ ID NO: 94607 - protein, 462 aa, Pontibacillus yanchengensis
  REGION 1..462: note = tr|A0A0A2T903|A0A0A2T903_9BACI Isochorismate synthase MenF OS=Pontibacillus yanchengensis Y32; OX = 1385514 GN=menF PE=3 SV=1
MIQTTSTLYEKLYRSIATIDSSQSSQLVSVTTEIEEVKPLAFYQAGNTFKGERFYWSSADRSFTLVGIGEACKIESNEEGFQLTQKQWGELLNHAEIDNVTNASGTGPVAFGGFAFDPYKQASATWSDFPNSSTVVPRFLLTKSGTKYFITINALLSPEDSTDLYYQELVNQCTTLLEKEFEQSSEPQLIQQEEVAPEEWKRIVRETTEEIKAGKLGKVVLAREMIATFSSDIYIASLLNTLQEQQHQSYVFAYERGDSCFVGATPERLVKLEERELLSTCLAGTIARGETVEEDRYLGNQLLQDNKNLQEHEFVVNMIKAAVETCCHDVDVPDHPVLYPLRNLQHLYTPVRGKLYNGYTILDIVKQLHPTPALGGYPIKESIEFIREKEPFHRGWYASPIGWFDARDNGEFAVAIRSALITHNQAVLFSGCGIVEDSHPEAEYEETAIKFLPMLHALGGSQ

SEQ ID NO: 94608 - protein, 389 aa, Pontibacter sp.
  REGION 1..389: note = tr|A0A501WAN6|A0A501WAN6_9BACT Isochorismate synthase OS=Pontibacter sp. HB172049 OX=2589816; GN = FJM65_03000 PE=4 SV=1
MGDTTQNHTLEQIFGAAIAGQKAVAVWRLPLSQKVQACMQLGQQYTTGQPQLEASPFGFFFCPFQVSAQEQNIFIKGDLYFDGEKLAPAADAPEKQLQEFYTLLQAPPSINGWHTSANLENHTFQTEQGFMRAVEKAVEAIQAEQMEKVVLSRNSLQALPENFSPVAAFQAMADAYPRAFVSLVSVPGVGTWMGASPEILVSINEQQEFHTVALAGTQTAVENVADAIWRQKEIEEQAMVERYILSCFKKLRLREYTEVGPKTIKAGNLMHLRTDFKVNLKVVHFPTLGTDMLELLHPTSAVCGLPKEPALQFILAHEGYNRSYYSGYLGPVNSTSGSHLYVNLRCMQLQQHEANLYAGAGITEGSNPQREWQETQHKMQTMGKILSEY

SEQ ID NO: 94609 - protein, 435 aa, unidentified
  source 1..435: note = Pontimonas salivibrio
  REGION 1..435: note = tr|A0A2L2BSP8|A0A2L2BSP8_9MICO Isochorismate synthase OS=Pontimonas salivibrio OX=1159327; GN = C3B54_111774 PE=4 SV=1
MANATSEPPLAAAESDNPLLFQRLGKGVAGSGVALRAEFSGTNRFHDATTWWSEVVEHATVTNPLGRPGTGLLAMGAFSFSTLSHHRSVLIVPRHVWGTDEHGSWQTTIEVIEHETGGAAVEEDGLATSHAAATNALDNTANKSSRATEPESAAEPAARHNEWHAGQVSEARFLDLVSQAKQAISQGGLHKVVVARDLVRSFEQEPDWRIVLQGLTEAYPDTFVFSLDGFFGASPETLVSLRGEHVSLRVLAGSTARGSHPEEDRAQSEALSTSTKDLDEHQFAVRSVVESLAAANITAVADDNPFSLKLPNLWHLATDVVAKVPEGIGGLRVLQALHPTAAVAGSPTTDALAFLEEHENLDRGRYAGPVGWIDERGDGDWAIALRCAQYDPEAYTLTAYAGAGVVAESDPERELLETGLKFRPITEGAHHNSRP

SEQ ID NO: 94610 - protein, 381 aa, Porphyromonas crevioricanis
  REGION 1..381: note = tr|T1CS32|T1CS32_9PORP Isochorismate synthase; OS = Porphyromonas crevioricanis JCM 15906 OX=1305617; GN = PORCRE_1633 PE=4 SV=1
MRASPYCSIAELFSLPCSDSSAFVLIQMPGSVAQYWHCPTYSAVQKLQDLTSEEGFVFAPFCATAQTPIYFLPPLDVREFPLSTSISFPSHSTVSSKESVFGKRDYKPNDTYQSAFTSFHSAVRSGQFSKLVLSREEVLSLQDTITPIDLFADLLNLQQPGAKYLIFIPEIGFWLGATPEVLLCSSPQETYTMALAGTKALGREFEIGQDCEDFFGAKNNSEHEVVVDHIRTVLCSEGIKLGKTEKRALKSYNVQHLCTRFDFDNSDHLVIARLVDKLHPTPAVCGIPTEKAKDFIRKYEGYERRYYAGYLGYWQYRQQTELYVNLRSASIDKEGSLQAHLYAGGGIMPDSDYLSEWEETKLKMQPMHALLSPYITHYCLQ

SEQ ID NO: 94611 - protein, 383 aa, Porphyromonas uenonis
  REGION 1..383: note = tr|C2MBE4|C2MBE4_9PORP Isochorismate synthase; OS = Porphyromonas uenonis 60-3 OX=596327 GN=PORUE0001_0621; PE = 4 SV=1
MLSKRSHKELKGRSCSCDELVTLVAERMNRRAPFACFRLPGEGRTVHEIGLQNEARAVATTTEELREWKKHLAGFLMAPFAVTIETPMLWIEEEQGKQGASVLQLAACDEAELESFPPVAPIPQALPDSYRVTFARFMEHLQDGMAEKLVLAHLVELPSIATAQVVGAFDKALTHYPNAFVSLCYTPQSGLWLCATPEMLLRGDGADWQTVALAGTMPRQADGEPSVWSEKNRREHHYVQRFIGELLEQEGIPYQALDVETTTTGQLQHLQARFALQLPEGYAPITLAERLHPTPAVCGTPQRVAQRLILEEESAERSYYAGFLGWYEPERRVDLFVQIRCLQLLPEQALRLYAGGGIVRGSSLESEWQEVLHKLSAIHSLIR

SEQ ID NO: 94612 - protein, 469 aa, unidentified
  source 1..469: note = Pradoshia sp.
  REGION 1..469: note = tr|A0A5J6XS78|A0A5J6XS78_9BACI Isochorismate synthase OS=Pradoshia sp. D12 OX=2651284 GN=F7984_15750; PE = 4 SV=1
MAIKQMTDIQQELTEALHTVKRIAMPILFSHVEAVTNKKPIDIYQSSECLYKGERFYWKDPDNELYLAGIGTARKLQSLTNGEKRFKDIKDKWTALMESAIVNGVNSGKGTGPLCFGGFSFNSKNTEPGSNWSQFGSYLFYIPKFLITETNHGSYLTSSIYLTPHMSDKEVRQFIEDRDAFLSMSDSGQKEMPAIIERQEHIVEEWKQAILKSVEDIRNGQMEKIVLARELSLQFEDEVPSYKVLENLMIQQNGSFIFGLESGDDCFIGASPERLIKKEGPAVFSACLAGSTPRNEDEEIDSALGNELLNDDKNRSEHQFVVNMIKEAMEEHCIEINIPDAPVLMKLKNIQHLYTPVNCVSLPGTSVLDFVELLHPTPALGGSPRNIAMEKIEKYEGMDRGFYAAPIGWMDIYGNGDFSVGIRSGLLKKDKASLYAGCGIVEKSNPESEYMETKVKFKPMLSALEGRNI

SEQ ID NO: 94613 - protein, 440 aa, Pragia fontium
  REGION 1..440: note = tr|A0A379DSK9|A0A379DSK9_9GAMM Isochorismate synthase MenF OS=Pragia fontium OX=82985 GN=menF PE=3 SV=1
MKQMSELVKLLHQRLQEAARPQPGRERISVPLTLQQRSSLLPWLAAQPIFPQFYWRQRDDKEEAAVCGEVVRFNDAASARQFLISNDVGNMRIWGLNTFDQVEAPSADRPKSALFLPRIEMLRDADGARLVVNLYSETSLADDVALAQQSLKLLTAGEPLAPLNVKINAVHHQPEKQGWCDLLDQALEAISQGQFEKVVLARQSTLSLNAPLNPAAFLNASAAVNHHCFHFMMRMDRETAFLGSSPECLFLRMGRSLTTEALAGTVASSPDNQEAKRLGDWLMRDKKNQHENLLVVDDICQRLQGGILAIDVLPAEIVRLRKVQHLRRCIHADLAKIDDADSLQRLQPTAAVAGLPREPARQFILQFEPFTRGWYAGSAGYLSLNQTEFAVSLRSALIEGNNIHLYAGAGIVAESDPQQEWLEIENKAAGLRTLLEREDW

SEQ ID NO: 94614 - protein, 437 aa, Pragia sp.
  REGION 1..437: note = tr|A0A411WID1|A0A411WID1_9GAMM Isochorismate synthase MenF OS=Pragia sp. CF-458 OX=2498113 GN=menF PE=3; SV = 1
MKQISELVTQLHKRLQEVARPEPSRERITVSLTLQQRTSLLSWLAAQPVFPQFYWRQRDDLEEAAVCGEVIRFNDADSARQFLISNNVADMRIWGLNTFDQVETPSLNTPKSALFLPRIELLRDIDGGKLVVNLYSETSLADDVAIALKSIEQLTTSKPLPVLNVTVNSVQHQPEKQGWCDLLNQALAAIQQGQFEKVVLARKSTLSLNEPLNPAAFLNASEKVNHHCFHFMMRMDDKTAFLGSSPECLFLRVDQHLTTEALAGTVASSSDNQQAKQLGDWLMQDKKNQHENLLVVDDICQRLQGGILAIDVLPAEIVRLRKVQHLRRCIHAELAVANDADSLQRLQPTAAVAGLPREPARQFILQHEPFTRDWYAGSAGYISLNQTEFAVSLRSALVEGRNIHLYAGAGIVAGSDPEQEWLEIENKAAGLRTLLEE

SEQ ID NO: 94615 - protein, 384 aa, unidentified
  source 1..384: note = Prauserella endophytica
  REGION 1..384: note = tr|A0A4V5S809|A0A4V5S809_9PSEU Isochorismate synthase OS=Prauserella endophytica OX=1592324; GN = FCN18_21760 PE=4 SV=1
MDAARLLEDYARGDFFLATAHRTILGSGADTELTGTDEARLAERVRRALTDARTPIAAGVLPFDSAAGGGTPARIVIPEDVRFAGRPHPAVDRLPRRHVGLPERVSPVPEGRRHAEAVADAVRKLGERGLRKVVLARALDLEFTEPVPPEAILHNLVKDNDRGYTFAAGLPGGRTLVGASPELLLSRQGDRVVSHPHAGSMPRSADPVTDRDNGEALLASRKDHIEHAVLAEAVVEALRPFCRKLDAPEEPELVSTPTMWHLGTTITGELADRDVTALHLAAALHPTPAICGTPTKSARELVTELEPFERGYYAGAVGWVDAEGDGEWAVTIRCAEVAERSLRLYAGGGIVPESDPWAELDETSAKFATLAEAMGLPRGWLAEF

SEQ ID NO: 94616 - protein, 352 aa, Prevotella amnii
  REGION 1..352: note = tr|E1GVP0|E1GVP0_9BACT Isochorismate synthase; OS = Prevotella amnii CRIS 21A-A OX=679191; GN = HMPREF9018_0844 PE=4 SV=1
MPSFYNFLLTEKIQKGSFALSRLPFSDSCTCYYQASPPSEFYNLNSLNGKKGFIFAPFIASKKYPILLFEDAVSKKITLPPSGEKILLKDFENKDIDISYTKAFNTFYNALQNNLFDKLVLARYVDIKTSHINLESIFLEACKQYPQQHIILVSTPQSGIWLMATPEILLDKINGNIWHTMALAGTMHKDKCNIKWSNKNKEEHNYVVKYILNCLQQYSNSINVSEPFTTFASNLAHLRTDFQFTLTNENNIGNLLSTLHPTPAVCGIPKEAAKDFILSNEGIDRSYYSGFIGPLNINNETHLYVSLRCMQIMDNCCRLYAGGGLLSESKKESEWQETEAKLQTMLQLLQQT

SEQ ID NO: 94617 - protein, 344 aa, Prevotella baroniae
  REGION 1..344: note = tr|U2P4X6|U2P4X6_9BACT Isochorismate synthase; OS = Prevotella baroniae F0067 OX=1115809 GN=HMPREF9135_1934; PE = 4 SV=1
MMDNYAVYRLPHQKHYMLLSQTDGDLQRVDSVADLSGCRGFVMAPFMQTEECPIVVIRPDVMEEVALPATASPHCHAEPVGSDNLDCYRNDFLLFHEALAAGRFKKLVLARRCDFRHAETDPMALFVQACSLYPRLFIALVSTPLTGTWLFATPEILLEGEGNVWRTMALAGTMKLEAQDLKGEGESSRWSPKNIQEQRYVANYITGCLQKFASDFTEEGPSTVRAADLVHLRSDFTFQLKDDNHLGAMLEALHPTPAVCGLPKKEARDFILLHEHSPRKYYSGFMGPLFPGGQTHLYVSLRCMQLTDQMFHLYAGGGILKDSDVDSEWMETEAKLQTMRNVFK

SEQ ID NO: 94618 - protein, 328 aa, Prevotella bergensis
  REGION 1..328: note = tr|D1PXD5|D1PXD5_9BACT Isochorismate synthase; OS = Prevotella bergensis DSM 17361 OX=585502 GN=entC PE=4; SV = 1
MAQSKGEPSAYGSVAELDEEEGFVMAPFMVSRQHPVLVMHPDVVENHEIQFQQNHASTKTTAPERPTEKAAYASAFAKFHAETQTRKFGKIVLSRCSPTDLPDDITPQDLFLKACNIYPHQFVALVCLQQAGTWLMATPEILLDGNPEEWHTMALAGTMKREEGIPHVSKTVWTKKNREEQQYVSTYIKDVLSKHADHISEQGPYTVAAAHLLHLRTDFTFKLNNTANIGALIEALYPTPAVCGIPKEKARAFISASEQIDRKYYSGFCGPLSLHGETHLYVALRCMEIVGKTANLYAGGGILHDSNMEREWKETQTKMLTMHRLLNN

SEQ ID NO: 94619 - protein, 334 aa, Prevotella buccae
  REGION 1..334: note = tr|D3I0Q0|D3I0Q0_9BACT Isochorismate synthase; OS = Prevotella buccae D17 OX=575611 GN=HMPREF0649_02082; PE = 4 SV=1
MDSFAFYRLPEQREYVRMKQTTGSPRTIGSVAELGEQRGFVMAPFAASEDCPIVLLEPDEVSVCPVGDDVEAHIEDCPVREDAERACYQADFARFHARLKSGEFRKIVLARCSEVSLRGPVDTESLFLHACHLYPHQMIALFSSPLTGTWLMATPEVLLDGDGCRWRTMALAGTMKTDGPWSEKNREEQRYVAGYIMDCLTRYGENVSRSATYTRSAARLCHLCTDFEFDLAPGCRVGDLLDALYPTPAVCGIPKEETRRYILDNEHTPRLYYSGFLGPLDPVGETHLFVSLRCMKIGAGLQLYAGGGLLTDSREEREWEETEDKLNTMRHVFE

SEQ ID NO: 94620 - protein, 371 aa, Prevotella buccalis
  REGION 1..371: note = tr|D1W646|D1W646_9BACT Isochorismate synthase; OS = Prevotella buccalis ATCC 35310 OX=679190; GN = HMPREF0650_1634 PE=4 SV=1
MSSIAYYRLPHAEHFIRLEQTQGEPEVLTRLTELNGREGFVMAPFTIDAAHPIVLMHPDKVQEENINESDPCSCQRDGRLMDAEKQEERLAYGRDFRQFHQALKAEKFDKLVLARSEEVERCDGANAESLFLAACRCYPRQAIVLVCTPMTGTWLMATPEVLLSGDGERWRTMALAGTMKLNDDESQPVMSRQLAGNKLSVGERVWSDKNRQEQRCVAMYIQQSLVPFAAHVEERGPYTVQAGGLVHLRTDFTFELRDPNQLGTLLEALHPTPAVCGLPKAEAHRFILQNEHIHRSYYSGFVGLLNPKGETHLYVSLRCMQISDRSYRFYAGGGLLADSIEQQEWEETVAKMETMKKVVASPPTPPQREGE

SEQ ID NO: 94621 - protein, 392 aa, Prevotella copri
  REGION 1..392: note = tr|D1PBC3|D1PBC3_9BACT Isochorismate synthase; OS = Prevotella copri DSM 18205 OX=537011 GN=PREVCOP_04502; PE = 4 SV=1
MIAFAYYRLPYLHHATYVAQHEGEPEVLSSVAELNGKEGFVIAPFAPSSECPVVLMHPDESKLLSAEGTENASRCGTSYVVTQQKLRRDVAESTSGRNFKAYAREFECFHRQISEGKFSKIVLARKLRILSHRQPLESVQTSAVQDAGKTSAVQNTANASVVQDADSLKALFLKTCRMYPRLFVALVYTPQSGLWLMATPEILLKGEQNQMATMSLAGTQKAEPSKTVADYPVEGIEWSEKNREEQQYVTDYIEDCIKVFSDDYQKKGPYTTMAANLYHLRTDIAFRLHDTGRLGDVLDALYPTPAVCGIPKDEARRFILQHEHQSRKYYSGFVGPISPKGKTHLYVSLRCMNILDDGSCELYAGGGLLKESEMEKEWKETEAKMQTILSVL

SEQ ID NO: 94622 - protein, 358 aa, Prevotella dentalis
  REGION 1..358: note = tr|F9D4I6|F9D4I6_PREDD Isochorismate synthase EntC; OS = Prevotella dentalis (strain ATCC 49559 / DSM 3688 / JCM 13448 / NCTC 12043 / ES 2772) OX=908937 GN=entC PE=4 SV =1
MRRNLVNYAYWRLPETNRCIFMAQADGEPEQLKTVADLDGRSGWVMAPFEPSADCPILLMHPDVVEELPTDGPPTGEAVPSTPCDGDRLWPELQVEGGADTAERQVYHRDFVRFHHEIVAGRFAKLVLSRRATVKGANVRAEQLFWKACRLYPHQFIALVSLRHAGTWLVATPEVLLSGNGDDWRTMALAGTMNAGGHRPADVAWSAKNVSEQQCVSSYIKEVLDGFARQVSSTGPYTTQAAHLLHLRTDFHFSLSDTAHLGRLLSALHPTPAVCGIPKEEARRFILGQESVERKYYSGFCGPLQPHGDTHLYVSLRCMEIQPDGCRLYAGGGLLPESREESEWLETQNKLQTMLRLL

SEQ ID NO: 94623 - protein, 348 aa, Prevotella denticola
  REGION 1..348: note = tr|F0H4U6|F0H4U6_9BACT Isochorismate synthase; OS = Prevotella denticola CRIS 18C-A OX=944557; GN = HMPREF9303_2045 PE=4 SV=1
MEPFFMYREPFDRTLHCYTQQERPVLFRSLPELDGHEGFVIAPFSCDAEHPICLLNGESGCSRDLPLDREASFEAVPDWQTGSMAVHLPGHIRADYHADFIRFHGELEDGMFRKLVLARSAVEYKDEKLTPRSIFIKACKSYPRSYIALFYTEETGMWLIASPEILLRGSADGYQTMALAGTMKYEGEDMEWSAKNREEQQLVAEYIRTGLQPFAAEIAESTPYTARAAHLAHLRTDFTFHLRDRKRLGSFLSVFHPTPAVCGMPKEAARQFILRNEHLQRSYYSGFSGLIGRSGQARLYVTLRCMQLSRTVCRLYAGGGILKESNEENEWQETEAKLDTMRQLLRSD

SEQ ID NO: 94624 - protein, 338 aa, Prevotella disiens
  REGION 1..338: note = tr|A0A3E4QL65|A0A3E4QL65_9BACT Isochorismate synthase OS=Prevotella disiens OX=28130 GN=DXC89_04325; PE = 4 SV=1
MRSFAIYRLPCAKECTKMVQQTAPLEVASLQDLNGKTGFVIVPFMPSAQCPILLLQPEEVVTLAVKQPETILKKEVKPTERKEYRDDYHKDFAVFHEQICNGRFSKIVLSRCVEEEKSSNLQAEKVFWRACQCYPRQFVALFSTPQTGTWLMATPEILLDGNSSNWKTMALAGTMPYQSDEIIWSEKNKAEQQYVAKYIRQCLEQHATDIEEQGVYTAQAANLAHLRTDFKFQLKDNTQIGTLLNTLHPTPAVCGIEKETARKFILDNETTPRRYYSGFAGALNLNGNTHLYVSLRCMEIMETKCRLYAGGGLLTDSTEESEWQETEAKLATMRQLLE

SEQ ID NO: 94625 - protein, 338 aa, Prevotella intermedia
  REGION 1..338: note = tr|A0A3R8HHE5|A0A3R8HHE5_PREIN Isochorismate synthase OS=Prevotella intermedia OX=28131 GN=D2S45_10535; PE = 4 SV=1
MRSFAIYRLPFAEECTMLVQHSAPSELSSLTELNGKEGFVIAPFSPSADCPILLLQPDEVRTMPVKEVQPLTKKEEEANEKEADRAKYHRDFNAFHKELANNKFAKIVLSRCVQEQIPHDLQPEKVFWQACKKYPRQFVALFSTPQSGIWLMATPEILLDGDGSEWRTMALAGTMPYNENGVEWSAKNKAEQQYVSLYIKRCLERCADEIKEEGAYTTQAADLVHLRTDFSFKLRPDAAIGQLLSDLHPTPAVCGMPKDETKAFILANESNKRLYYSGFAGPLNLQGNTHIYVSLRCMQMQAGVCNLYAGGGMLKESTEESEWKETEAKLSTMRQLLR

SEQ ID NO: 94626 - protein, 339 aa, Prevotella marshii
  REGION 1..339: note = tr|E0NVS2|E0NVS2_9BACT Isochorismate synthase; OS = Prevotella marshii DSM 16973 = JCM 13450 OX=862515; GN = HMPREF0658_2277 PE=4 SV=1
MDSRALIRLPHYTHYTEVRQTTGRLQELHDLHALDGRVGFVFAPFMPSKQEPILLIRPDSMEQHEVSMPKHLPAQRRVLDEETDKAQYMADFNSFHKPLKQDLFRKIVLARCSEQTTDETPLPDELFLHACRLFPHLCVALVSTPVSGTWLIATPEVFLESMGSQWHTMALAGTMEATTDEPCWSMKNQEEQRCVATYIRECLKPFSTRITEEAPHASQAGHLLHLRSDFLFTLKNPSHLGALIAELHPTPAVCGMPKEETRRFILRHEHAPRRYYSGFMGLLAPEADTHLYVSLRCMQIDGNHYRLYAGGGLMKDSTPMQEWEETRAKLETMQRCITL

SEQ ID NO: 94627 - protein, 348 aa, Prevotella melaninogenica
  REGION 1..348: note = tr|D9RS82|D9RS82_PREMB Isochorismate synthase; OS = Prevotella melaninogenica (strain ATCC 25845 / DSM 7089 / JCM 6325 / VPI 2381 / B282) OX=553174; GN = HMPREF0659_A6048PE=4 SV=1
MDAFFIYREPFEKVCHCYSQPEKPTAISSLAELNGRKGFVIAPFFCDDSNILYLLDGQKGSSTVLPLDGSKGFDAIPDWQDEAVLTNETPSLREAYHNDFCRFHKELEHNRFRKLVLARSIIETKDERTTPRSIFLKACEKYPRSYIALFYTAEIGMWLIASPEVLLRGNAEGYQTMALAGTMKYEGEDMKWSSKNQEEQQLVADYIRACLQPFAAEITESKPYTTRAAHLAHLRTDFTFQLKDTQRLGTFLTAFHPTPAVCGMPKDEAQQFILHNEQLNRSYYSGFSGLLGEKGAAKLYVTLRCMQLSRSTCRLYAGGGLLKESIEENEWQETEAKLDTMRQLLKHN

SEQ ID NO: 94628 - protein, 347 aa, Prevotella multiformis
  REGION 1..347: note = tr|F0F9H1|F0F9H1_9BACT Isochorismate synthase; OS = Prevotella multiformis DSM 16608 OX=888743 GN=entC PE=4; SV = 1
MEPFFVYREPFEKVCHCYTQPEPPAVIRQLSELDGREGFVIAPFSCSTDCPACLLDGQGGALRHLPLDNSNGFEAIPDWQPDDLTAEPADCTRAHYHADFIRFHSELEAGTYRKLVLARSAVEHKAGTLTPRTVFLKACERYPRSYIALFYTAQTGMWLIASPEILLRGGAEGYQTMALAGTMRYEGADRAWSAKDREEQRLVADYIRAGLQPFADGIAENGPYTARAAHLAHLRTDFHFRFRDTLRLGSFLSAFHPTPAVCGMPKEAACRFILRSEHLSRSYYSGFSGRIGDGRAMLYVTLRCMQLSRTVCRLYAGGGLLKESIEENEWQETEAKLDTMRQLLRSD

SEQ ID NO: 94629 - protein, 338 aa, Prevotella nigrescens
  REGION 1..338: note = tr|F9DA95|F9DA95_9BACT Isochorismate synthase entC; OS = Prevotella nigrescens ATCC 33563 OX=997352 GN=entC PE=4; SV = 1
MRSFAVYRLPFAEECTMLVRHSAPSELSSLTELNGKEGFVIAPFSPSADCPILLLQPDEVRMMPVKEVQSLAKEKQEASEKEADRAKYHRDFAAFHKELANNKFAKIVLSRCVQEQIPHDLQPEEVFWQACKKYPRQFVALFSTPQSGIWLMATPEILLDGNGTEWRTMALAGTMPYNENGIEWSAKNKAEQQYVSLYIKRCLERCADEIKEEGAYTTQAADLVHLRTDFSFKLRPDAAIGQLLSDLHPTPAVCGMPKDETKAFILANESNKRLYYSGFAGPLNLQGNTHIYVSLRCMQMQTGVCNLYAGGGILKESTEESEWKETEAKLSTMRQLLR

SEQ ID NO: 94630 - protein, 348 aa, Prevotella oralis
  REGION 1..348: note = tr|E7RR92|E7RR92_9BACT Isochorismate synthase; OS = Prevotella oralis ATCC 33269 OX=873533; GN = HMPREF0663_11693 PE=4 SV=1
MSSYVMFRLPEAAEYSVVRLAADEPEKLYSAGALSGKSGFVFAPFFPSQEHPVLLFATDEISILPLPPAEMPQAGQTEIVCRNDGRRQYAADFTRFHRELAAGNFAKLVLSRCCEVETAVSLSPETLFMRACHLYPSMFVALISAPESGTWLMATPEILVETAGTEYRTIALAGTMKGKRDAVDWSLKNREEQRYVAAYVRECLKDIAADITEQGPQTVRAADLLHLRSDFTFRLNDGQTIGSLLEALHPTPAVCGLPKDKARRFILSNESVAREYYSGFAGITGVCGTTQLYVTLRCMQIDGRKCRLYAGGGLLPSSTEQQEWDETEAKMQTMMRCLCAEQNTENDV

SEQ ID NO: 94631 - protein, 334 aa, Prevotella oris
  REGION 1..334: note = tr|D1QUV6|D1QUV6_9BACT Isochorismate synthase; OS = Prevotella oris F0302 OX=649760 GN=HMPREF0971_02792; PE = 4 SV=1
MTATVVYRLPDTDHYVHIRSRHEPLRLSSYEELNGQQGFVFSPFAVSEDTPLLLIRPDEVEVLPFRPSDNDTVSVEKVLFDREEYHKDFQCFHTELLNRHFQKIVLSRHVDVKCCERPSPMHLFVKACTLYPHQFICLISMQQSGTWLMATPEVLIEKQAGSPAWHTMALAGTMRKEGPWSEKDCREQQYVADYIAQHLANHAIEVRRSQPYTRIAAHLYHRCTDFHFILKDDRYIGNVISSLHPTPAVCGIPKRETQDFILQHESHNRKYYSGFCGPLQMNDATHLYVSLRCMLLMEQNCRLYAGGGLLDNSDETREWRETEYKLNTMLDVLR

SEQ ID NO: 94632 - protein, 364 aa, unidentified
  source 1..364: note = Prevotella oryzae
  REGION 1..364: note = tr|A0A010YCC2|A0A010YCC2_9BACT Isochorismate synthase family protein OS=Prevotella oryzae DSM 17970; OX = 915438 GN=XylorDRAFT_0225 PE=4 SV=1
MSSFALYRFPHENYCTLLSQKMRQPIELLSYSDLSGKEGFVIAPFNASKDEPILLLESEKTKKILLSDFDYTFKNSNSDSENYFDAVYEGAERLKYTVDYENFSSQIASGKFSKIVLARRKVVKSKLEIAPEELFKRACKLYPRMFIALVHTERSGTWLTASPEILLEGHERNWRTIALAGTMKLEGCQLNFDASNEMCDSDMIKWSDKNIQEQGYVAKYIKECLDKFSNNVVEEGPFTVRAGNLVHLRSNFDFTLQTSDNIGELINSLHPTPAVCGLPKDTARRFILKNESVPRHYYSGFMGPLNTQYGTHLYVSLRCMNIEGRTYKLHAGGGLVKNSEEAMEWKETEDKIETMGKCLVTKKI

SEQ ID NO: 94633 - protein, 338 aa, Prevotella pallens
  REGION 1..338: note = tr|A0A379EZH6|A0A379EZH6_9BACT Isochorismate synthase dhbC OS=Prevotella pallens OX=60133 GN=dhbC PE=4; SV = 1
MHTFAIYRLPFATECTMLIQYSAPLVLSSLTELEGKKGFVIAPFNVSDKCPILLLQPNEVRTMPIKQVQSKPKEKQNTSENEVYRMQYHRDFVAFHKELTNNRFAKIVLARCVQEQIPHNLKTEEVFWQACKEYPRQFVALFSTPQSGTWLMATPEILLDGDGIEWRTMALAGTMPYNENGAEWSAKNKAEQQYVSLYIKRCLKCYADEIKEEGPYTTQAANLVHLRTDFTFKLRPNATVGQLLHNLHPTPAVCGMPKDEAKSFIMANESNERLYYSGFAGPLNLNGNTHLYVSLRCMQMQTNTCKLYAGGGILKESTEESEWKETEAKLSAMQQLLR

SEQ ID NO: 94634 - protein, 344 aa, Prevotella pleuritidis
  REGION 1..344: note = tr|U2MS09|U2MS09_9BACT Isochorismate synthase; OS = Prevotella pleuritidis F0068 OX=1081904; GN = HMPREF1218_2232 PE=4 SV=1
MESFAYYRLPFCNRYTLLRQSCGRPRALSSAAELGRQSGFVIAPFAVSTDCPMLLLTPDEVEEHPVPLLETVLQTPIPITITTDRAGYSADFVRFHRSICNGTFSKIVLARSAEVVANEVVGAEALFFRACCLYPQLFVSLFSVPACGTWLMATPEILLDGNRSDWHTMALAGTMKWRGEVCGEALWSDKNIQEQRYVSTYLAHCLGRFGAGITETEPRTVRAGQLVHLRSDFRFTLPDGRKIGNLINALHPTPAICGLPKDEAYRFILANEHISRRYYSGFAGPFDPDGTTHLYVSLRCMQIFDNYYRLYAGGGLLSDSTEQQEWDETEAKMETALEVFKLMS

SEQ ID NO: 94635 - protein, 346 aa, Prevotella ruminicola
  REGION 1..346: note = tr|D5ETM7|D5ETM7_PRER2 Menaquinone-specific isochorismate synthase OS=Prevotella ruminicola (strain ATCC 19189 / JCM 8958 / 23) OX=264731 GN=menF PE=4 SV=1
MSAYAIYRLPHEDHATLITQSVGEPMELHSLTELNGKQGFVVAPFEVKADQPVVLIQGKTEMIALSNEQLTADDGKNRLPSDMSNYYKVDFANYHSQLEADKFRKIVLARCADEQMPNGVKPIDLFYRACQLYPRLFIALVDTEKSGCWLTATPEILLDGHGADWRTIALAGTMKLEGDQLDGEGETLTWSTKNIQEQRIVATYITECLELFTGDFREEGPRTVRAANLVHLRSDFTFKLADNNKIGDLLQALHPTPAVCGLPKREAFKFIVKNEHTPRRYYSGFMGPVALEDTHLYVSLRCMNIDGDVCHLYAGGGLLKDSVEEQEWLETEAKMETMKKLLYVQQ

SEQ ID NO: 94636 - protein, 334 aa, Prevotella salivae
  REGION 1..334: note = tr|E6ML99|E6ML99_9BACT Isochorismate synthase; OS = Prevotella salivae DSM 15606 OX=888832; GN = HMPREF9420_0266 PE=4 SV=1
MSSFVAYRLPEAKDYVYIRSQKAPIVLSTYTELVGKEGFVVAPFAISESTPLLLIQADSIDTKTCFADNLIARRIKKENEDPLSYHSDFENFHAELLNHHFQKIVLSRHVDVKCDTTPNPMHLFLKACALYPHQFICLVSTEQSGTWLMATPEILVEQQDKESPWHTMALAGTMRKDGPWDEKDCREQEYVADYIEQCLADYATDIYRSQPYTRKAATLYHRCSDFEFRLKDGVSIGNVISALHPTPAVCGIPKHETQAFIMRNESHDREYYSGFCGPLHLNGSSHLFVSLRCMKLVGERCRLFSGGGLLDQSDEKHEWRETEYKLNTMMDVLR

SEQ ID NO: 94637 - protein, 348 aa, Prevotella sp.
  REGION 1..348: note = tr|A0A3R6FJG3|A0A3R6FJG3_9BACT Isochorismate synthase OS=Prevotella sp. AM34-19LB OX=2292364; GN = DW830_06235 PE=4 SV=1
MTAFAYYRLPYLHHAHYVAQREGEPEVLSSVAELNGKEGFVIAPFSPSGDCPVLLIHPDESKLLPISDAKAISISDSAQGEDASDRDAYAEDFECFHQELEKGTFRKIVLARKATVRTADKDFENLFMKACRMYPRLFVSLVYTPQSGMWLMATPEILLKGEQGNMSTMSLAGTQKAEPSRTVADYPVEGVEWSHKNQEEQQYVTDYIEDCIKAFADDYQLKGPYTTMAANLYHLRTDISFRLRNEGRLGDVIDALYPTPAVCGIQKEEARRFILQHEHQPRKYYSGFVGPISPQGKTHLFVSLRCMNILPDGVCELYAGGGLLKESEMEKEWKETEAKMQTIRRVLL

SEQ ID NO: 94638 - protein, 369 aa, Prevotella stercorea
  REGION 1..369: note = tr|A0A3R6K3Y8|A0A3R6K3Y8_9BACT Isochorismate synthase OS=Prevotella stercorea OX=363265 GN=DW060_11705; PE = 4 SV=1
MSYVYFRLPHSTHVFRNRLSTEPEEIASLAELNGRRGFVITPFTPSDDCPILLLPTDWEEVDLNFSGDNQNGEQTHLSSTDGVSAMLLDADYEKERQRYAVDFHNYHGQLTNDAFQKIVLARSARLIATEKLSPLTLFARACHRYPRMFVALFSTERSGTWLIATPETLISGTNGAMQTMALAGTMRLSGANLNFDVEGGSIGKDDIHWSTKNIKEQRYVETYITECVEQFSDDVNVEGPFTVRAGDLVHLRSDIRFHLKDTAHLGNLINTLHPTPAVCGMPKDATRDFIINNESGERNYYSGFSGLLDPNGDTRLFVTLRCMQIESESEATTYRLYAGGGLLKDSQCQSEWEETEAKMNTMRQLFKHI

SEQ ID NO: 94639 - protein, 371 aa, Prevotella timonensis
  REGION 1..371: note = tr|D1W1B1|D1W1B1_9BACT Isochorismate synthase; OS = Prevotella timonensis CRIS 5C-B1 OX=679189; GN = HMPREF9019_1531 PE=4 SV=1
MNSFAYYRLPDNRHFIKLTQKNGEPETYFSLTDLNGKEGFVLVPFKIDEAHPVVLIHPEKKERVRISKCSARLHDEYGATTLATSSDGRERYGEVFRCFHQQLKDGKLAKIVLARREEISHLATIDAEAMFLEACRIYPHLCIMLVSTPQTGTWLMATPEVLLDGDGETWRTMALAGTMKAEGLPPDADCSSASTPWVDGNDMCDWSAKNKHEQQLVATYIQQCLSPFTAQLTQRGPYTVQAGDLVHLRSDFMFSLHDTKSLGSLLEALHPTPAVCGLPKAEAQRFILENEHADRSYYSGFAGLLNPNGETHLYVSLRCMQILEKSYRLYAGGGLLLDSVEQQEWEETVAKMETMKKIVASPPTPPQKGGE

SEQ ID NO: 94640 - protein, 347 aa, Prevotella veroralis
  REGION 1..347: note = tr|C9MMG0|C9MMG0_9BACT Isochorismate synthase; OS = Prevotella veroralis F0319 OX=649761; GN = HMPREF0973_00790 PE=4 SV=1
MDAFFIYREPFEEVCHYYSQQEEPTRLGSLTELDGHKGFVIAPFASNTTHPIYLLNGQSGQSSVLPLDGSKGFEAIPNGQDEAYLETSEIDPRIQYHNDFTCFHDELNRKSFRKLVLARTIVEKKDELLSPREIFLKACEWYPRSYIALFYTAQTGMWLVASPEILLRGDATSYQTMALAGTMRYEGEDIQWSEKNREEQQLVADYIRTCLQPFAIDITESEPFTSRAAHLAHLRTDFSFRLKDTQRLGSFLTAFHPTPAVCGIPKEEAHKFILRNEHTDRLYYSGFSGLLGNDGLAKLYVTLRCMHITRSACQLYAGGGLLKESIEENEWQETEAKLATMRQLIQQ

SEQ ID NO: 94641 - protein, 470 aa, Prochlorococcus marinus
  REGION 1..470: note = tr|A0A0A1ZJJ1|A0A0A1ZJJ1_PROMR Isochorismate synthase Menaquinone-specific isochorismate synthase; OS = Prochlorococcus marinus str. GP2 OX=59925 GN=EU91_0347; PE = 4 SV=1
MKNDLNLTDFLKDVFSSFDKKVENSGLVSICIEIPRIDLLQVYKLFINKYPFSSFWEESNGISYIAFEKCKYVTLDGPKRFEVAKEFNSENFKNLINLTNESNNWALSKIIYLFSFSENLNNKNLSSDVPSLEAILPKILIIKSNKNCWLRINGYVEGKSSLRTLIEEIWTIRNQVITSGSKLIKSSGLNTSFDLPIIDDFLHSLETSNASLKKVLNRGIQLVEKGILEKIVLANRIKIKFRNKFDLVEILKRLKKNHPNTCRYVWKRNSKDILFGASPEKLFSFTKPNLTLEALAGTISTNSNYKKLLKSTKDVKEHNYVTQYLIKCLEVSKIKNFEKSDIKVNSFGDISHLQTLIFSKVENICPFELLKNLHPSPAVCGYPKNAALDWINTLESFPRGNYASPMGWVDSSGNASFLLAIRGARYLEENIEFTAGSGIVSGSVLEKEIDEIKLKFESIVKQIFFAKKPK

SEQ ID NO: 94642 - protein, 473 aa, Prochlorococcus sp.
  REGION 1..473: note = tr|A0A0A2CNL9|A0A0A2CNL9_9PROC Isochorismate synthase Menaquinone-specific isochorismate synthase; OS = Prochlorococcus sp. MIT 0701 OX=1499502 GN=EV12_1392; PE = 4 SV=1
MTADRSFSNLLTAASRGWCERKGDEGVLSLALPLDEVDPLYHLPLLADEHPFQFLWDSAPGLCFAAAGQCQSLDLAGPRRFEVAQRFSDTTLARLTDATPNAPAQARPKILLAFSFFDHPAERQRSQIRTSAVQAVLPRWQLSRQGRHGWLRLNGVITQQAEARDLAEQLWLMAENLLDPNHNSKDCWPSSVRGTTELQPWQECYRPALKRGLDLVSSGELNKLVLAVRQSIQLQTPLNPLPVLVKLRQQQSGSCRFLWRRTHEDAFFGASPERLLSLQGHQLRTDALAGTADRNDDGQELLRSEKDRREHELVVASITSQLCNQGLTPRRPRNPQLARHGQLVHLHTPITANAIGQTSLNLAKILHPTPAVAGLPCREAMAWLRTLEPFERGSYAAPIGWIDSQGDTELRVAIRCGHARGTVLDLTAGAGLVRGSVVERELQEVGMKLSVLADQLDLRTKDQPRLSSKRAIT

SEQ ID NO: 94643 - protein, 375 aa, unidentified
  source 1..375: note = Prolixibacteraceae bacterium
  REGION 1..375: note = tr|A0A4U2LES8|A0A4U2LES8_9BACT Isochorismate synthase OS=Prolixibacteraceae bacterium JC036 OX=2528631; GN = EYV94_17555 PE=4 SV=1
MKEFVDKIDVLLDAGCPFALYFYPGSQKPELVFQENRTLETVNSIHQLDGKKAFVMAPFHVSEDEPIICIEPDEVLHGYKSIMQFKVPVDVKLDNQWEEISALSGGQSEEKEEYTQKIESLVQDIQQGKFAKVVFARSIEETFNPNCQLGNLLLELKKKADQAFVYMVNLPGRAVWVGATPEIILEKQGDWLKTVALAGTIDAQNNQSEWSDKEIKEQQFVVDFVRDQLRKNGVERYKASERETVIAGNVAHLKTNFVFSEVDLKNDLVALLEDLHPTPAVCGLPKEDARDYILDREVHNRAYYSGFIGPWYVSDDACRLFVNLRCMKLTRGNAQIFVGGGITAGSDAAREWRETELKATNLQLVLKKYGSENII

SEQ ID NO: 94644 - protein, 441 aa, unidentified
  source 1..441: note = Propionibacteriaceae bacterium
  REGION 1..441: note = tr|A0A367YVB2|A0A367YVB2_9ACTN Isochorismate synthase OS=Propionibacteriaceae bacterium 16Sb5-5; OX = 2268447 GN=DT076_09490 PE=4 SV=1
MLVHSSAPVFVRSTLLPGTGIDAVLDLLRRGPAGGVDFGWLHGEDGAVGGGAAVRWEPRPGEGTGAAASWWDGVCARLEHTGDSAGHASLAFGSFPFDPGHTRAAPVLVLPEWVLVHRHGGTVLLEASTRPFPVPATARLDALLGAVDQAPQEPVGLHEEHEALDAEQWAERVARGVKRILVGDLDKVVLARQVTVRGDRPLPVGRLARRLHASYPRCWTFLVDGLVGASPEMLVRREEGLVTSRVLAGTIGVSGATPETLGAALASSSKDLLEHEYAVASVASALAPYCDGMNVPSAPYVLELPNVLHLATEITAATSPMTSVLELVGALHPSAAVCGTPTPTARRLIAELESMDRGRYSGPVGWVDSTGDGAWAIALRCGQVDPDDSRVVRLFAGCGIVADSDPDAEVAESEAKLVPMRTALAEASAATGRVASGTGAR

SEQ ID NO: 94645 - protein, 388 aa, Propionibacterium acidifaciens
  REGION 1..388: note = tr|U2Q5G0|U2Q5G0_9ACTN Isochorismate synthase; OS = Propionibacterium acidifaciens F0233 OX=553198; GN = HMPREF0682_2880 PE=4 SV=1
MMSSSSAAREPRFEFASSGRHLVATGVVRHVEPRSWVGTGVARAVEEVLAAPLEAPQLVVGVLPFDSARPGMLYRPAEACWRSCAFPGRPEPFAPSASTTAVTDRRPSHQGYRCLVAKAVETIRSGGLDKVVLGRCATVCAAAPWDPQSVFVRLGIQNPDAFVYLIDVPGGYGGEFAQEGVFLGASPELVLSCSGSRVRTVPLAGTTARWSEPERDERASEALLESGKDLAEHSYVVRAIARVFRARTDDPRIPSRPRLVPTPAVWHLGTEITGTLRGGASPFELLYELHPTPAVCGWPHERARDFIVDHEGFDRGLFAGLIGWIDADRNCEWALALRGGVLRGDRATMFAGAGVIATSEPEAELRETAAKMRTFLAALGGQEGRTDP

SEQ ID NO: 94646 - protein, 403 aa, Propionibacterium australiense
  REGION 1..403: note = tr|A0A383S3H5|A0A383S3H5_9ACTN ADC synthase; OS = Propionibacterium australiense OX=119981 GN=dhbC PE=4; SV = 1
MRASTAAIADPGPLTDFLDGSGAAFLRGQDGFIALGQMARLDDVSMDEADGWWEEFSAQIENETEMPEAFGTGPIAYGSFTYDPARTSQRSCFVVPEVIVGRREGRCWVTRLGYDRVDPVLPERHGPATAPGRVRFETSEEANQEWLDHFNRVKEYITAGRADRVVLLRQLDALAEGELDPRWVLHRWRLGYGGSWAYLVSGLVGATHEVMVRRRGGLTVSRILAGSVQALGGMDEATRTAQLLSSSERLSQHHHAVAAAAESLSPFMTGMHVPRQPFALSLPDGLNLATDICGVASPGHSCLALASALHPLASVTGSPLAAAREIIDETSTIDRGRFGAPVGWIDAQGDGEWFAALRACQLGQRGGARLYASATVSAGTSAHDKLVSTQVKLSQMRRLLTER

SEQ ID NO: 94647 - protein, 412 aa, Propionibacterium freudenreichii
  REGION 1..412: note = tr|D7GIX2|D7GIX2_PROFC Menaquinone-specific isochorismate synthase OS=Propionibacterium freudenreichii subsp. shermanii (strain ATCC 9614 / DSM 4902 / CIP 103027 / N CIMB 8099 / CIRM-BIA1) OX=754252 GN=dhbC PE=4 SV
MIINPGSSRLHASTIAIDDPGALTQYVDGHGAAFLRGEDGFVAMGEVARLDGATMSEADQWWTQLAADIEKESEMPGLVGTGPLAYGTFTFDPEHTAAASAFIVPETIIGRRDGVSWLTQLGYDRVNPQMPEVQPAPQPPAELFFEDGQISGADWLALIARTSAALRASGAEGVVLARDLHAIAEQKICPAWLLHQWRRNYGGSTCYLVDGLVGATPEILVHRRGGLTTSRILAGTTQRLDNVDEPAEIARLLSSQQRMHQHRLSVESAATALGAHMSGIHVPEAPFVLALPDMLHLVTDICGVTEGTFSTLALAAAVHPLSSVTGFPTDQARTILANSGFDRGRFCAPVGWIDAQGDGDWFVALRAAQLSPDWKGVTLYASASVDPDTAPHNKLVSTEMKFALMRQFLAGD

SEQ ID NO: 94648 - protein, 407 aa, unidentified
  source 1..407: note = Propioniciclava sinopodophylli
  REGION 1..407: note = tr|A0A4Q9KB29|A0A4Q9KB29_9ACTN Isochorismate synthase OS=Propioniciclava sinopodophylli OX=1837344; GN = ET989_12955 PE=4 SV=1
MTTGAAGQHTLQVQEPFATSLRRGLPLVWATGSGDDLTATLGWGEAFRATARGLDRFGTLDDAFTRWAARQGPDANPVAFATLTFAHDSSAESVLVVPQLIGRWAGGVLTVASQVAEPVGARLPRPSVPGEFEELELLPGTLTRQRYRQAVAAAVGRIADGEVEKVVIARDLLATSPDPLDVPALLARLQEANTASWTFHVDGLVGSSPEMLVATTGDRVHSQVLAGSAPVTGDVGLDDVTATRLAASAKDHAEHAYAARSVAERLETVATVSTRDPQVKRLRRIMHLATDITGTLHDHHSALALAGIVHPSAAVCGTPTDVAFRVIAELEGFDRGRYAGPVGWVDARGDGEFVIALRCGQVTADGTAIRLFAGGGIVAGSVPSDELAETARKFLPMYEALSPVDRP

SEQ ID NO: 94649 - protein, 437 aa, Propioniciclava tarda
  REGION 1..437: note = tr|A0A4Q9KJ88|A0A4Q9KJ88_9ACTN Isochorismate synthase OS=Propioniciclava tarda OX=433330 GN=ET996_11030; PE = 4 SV=1
MCPIARTGLSSSSVTVDPALPRLRACTVAIDDPGDLLDYLAEASDVAWIRRGDGLVGLGVAARVDVASLDDGAEWWKALSARIEHSTELPGAWGVGPLAFGSFAFDAGHTASTSVLIVPELIIGRRSGQSWLTAISADGHSPVLPAKAPDSDGPGRVEVRPVGLDAAGYAREVGRLVERINDPDSELAKVVLARALRAMGERPVEARWLAKRLASAYPSCWTFHVDGLVGASPEMLIRAEGGLATSRVLAGTIRRSDASQDEALADALSGSGKDLEEHEFAVASVANALRPFCSGMNVPDAPFVLQLPNVMHLASDVTGVMAGAFSALHLAGRLHPSAAVCGTPTAAALAAIAEHEHLDRGRYAGPVGWIDTHGDGEWAIALRCGQIAQDAASITLYAGCGIVGRSRPDAEVAETEAKLAPMLGALGVSPGAALGRS

SEQ ID NO: 94650 - protein, 408 aa, Propionispora sp.
  REGION 1..408: note = tr|A0A0K8JCF0|A0A0K8JCF0_9FIRM Isochorismate synthase DhbC OS=Propionispora sp. 2/2-37 OX=1677858; GN = dhbC PE=4 SV=1
MRRDFAVLEKQLLEDYQAGDFFFASPGGTLLGKGCFAVVQQERGKGKREKGLVQQVDAVLRQAKVQGFNNPVVTGAVPFDARQKARLIVPATLAVSDRLPLDVKAAFKPPVTSAYAVKSIPEPQAYSAGVAKGIDYIKSGRLSKIVLSRALQLTSSAAVDIHQLLCNLAQHNLKGYTFAVNLADMVPDQPGTDSALERNTLIGASPELLIARSGLQVTANPLAGSRPRGDTAAEDRRLAGELLSSRKDLHEHEVVVQAVAAALKPYCRKLTVPEAPSLINTEAVWHLSTKITAEIADPAVSSLELAMALHPTPAVCGSPTEAARAAIERIEPFDRGFFTGIVGWCDATGNGEWAVAIRCAEIQAQSLCLFAGAGVVAGSKPEEELAETAAKFRTMLTAMGIDKEVAGV

SEQ ID NO: 94651 - protein, 475 aa, Prosthecochloris aestuarii
  REGION 1..475: note = tr|B4S4J3|B4S4J3_PROA2 Isochorismate synthase MenF; OS = Prosthecochloris aestuarii (strain DSM 271 / SK 413); OX = 290512 GN=menF PE=3 SV=1
MSNMTDIIINAAEEPQPLLPAVDMIRKSISGYATGSDRHDIATGLVTFTVPLLPSIDALQWLNSQSIYPRTYWMNREGDDIAAGIGQADSIVYDHQGPNRRSFELLQQHITARQHNARYFGGCCFDNVQQRDPGWKPFKSLYFILPEIQITVTDRENTLSCHLFLDGRTPVNQLCARLMATLEAMQPVVTPSPDCNLPDVTSTSFKPDMKQWIEICNKALEKFQKGFMGKMILARQTTLKFSVPFSPLLFLIKYPFPDSSTYRYYFEPEKNKAFFSFTPERLYRRDHDRLLTEALAGTCSKQALEEDSIDACRHLLNSEKDIREHRFVKDTILKELSPICSTIDMEEEVRALQLNSLVHLYTRCKATLNPESSNDATVLSSLHPTPAVGGVPRDEALQQIIDLEPFSRGWYAGPIGWISRQSSEFAVGIRSARSDGQTVFLYSGAGLVKGSNPASEWQEVDHKIGDMLAIIRQTL

SEQ ID NO: 94652 - protein, 471 aa, unidentified
  source 1..471: note = Prosthecochloris marina
  REGION 1..471: note = tr|A0A317T7M4|A0A317T7M4_9CHLB Isochorismate synthase MenF OS=Prosthecochloris marina OX=2017681; GN = menF PE=3 SV=1
MNKPTDIIEQVSEPLPMKKALSTLQKMVLDHANAAGSVSEPYLQTFSIAVSSTDPLLWLHNQDLYPKFFWSNRKKDDLVAGIGTADVIEYDKTGPNNVSFDILQKELCKKNPGTRYFGGFCFNNEQKQDEQWRAFKSFTFVLPDIQLSVTDGTHTLSCHLMIEPGENSEVRYRRLLETIAKINSSTLRDIPPLPEINSRSFSPDKKQWIKTCNQILQRFQEGLMGKIILARQTLLEFNRGFSPLLFLLRYPFSESSTYRYYFEPEKNTAFFSFTPERLYRRKNNELLTEALAGTCSRETIDNGNGDACQQLLNSEKDIREHKFVKDTIVRELEPICSDIDMEERVRALQLNRLAHLYTQCRAELKPEASNDSAVLKTLHPTPAVGGVPKTKALEQIIQLEPFSRGWYAGPVGWISRNSAEFAVGIRSAVAKENMFYLYSGAGLVRGSNPESEWEEVDQKIADILAITRQKR

SEQ ID NO: 94653 - protein, 487 aa, Prosthecochloris sp.
  REGION 1..487: note = tr|A0A1B1Q4E8|A0A1B1Q4E8_9CHLB Isochorismate synthase MenF OS=Prosthecochloris sp. CIB 2401 OX=1868325; GN = menF PE=3 SV=1
MTTYADTTIRAARSPLPLAAATAMIRKSIHEFCSDPGRKSSPGRLITFRTELEPLDTLAWLHNQNTYPRLFWMNRDHTDSVAGIGAADSISCDNNAPNSESFSFLQKTLENKNIAARYFGGCCFNNLQRRDASWAPFTSLYFILPKLQVTSSYGRQELSCHLVLQEGRSLRQSCQDLLDSLDRMQLESSAPDAVIPQPATISYLPNRKEWIERCNDVLQTFSEGFVAKIILARQTSLTFSERFSPLLFMLRYPFPESSTYRYYLEPEEGKAFFSFTPERLYHRHNNSLVTEALAGTCSRERGATDGTTACDHLLNSEKDIREHSFVKNTIADELASICTTIEMENEARALQLNNLVHLYTRCTATLRHDAARDATILETLHPTPAVGGVPKEEALKHIMHLEPFSRGWYAGPVGWISPDKAEFAVGIRSALADGRVVHLFSGAGLVKGSDPSMEWQEVDHKIADMLAMTGCPAYTSGEKSDPSYEAL

SEQ ID NO: 94654 - protein, 487 aa, Prosthecochloris vibrioformis; identical to SEQ ID NO: 94653
  REGION 1..487: note = tr|A0A5C4S4A0|A0A5C4S4A0_PROVB Isochorismate synthase MenF OS=Prosthecochloris vibrioformis OX=1098; GN = menF PE=3 SV=1

SEQ ID NO: 94655 - protein, 358 aa, Proteiniphilum sp.
  REGION 1..358: note = tr|A0A3M8EDJ5|A0A3M8EDJ5_9BACT Isochorismate synthase OS=Proteiniphilum sp. X52 OX=2382159; GN = D7D25_16480 PE=4 SV=1
MTAPQPSYPILDVLIEQDACFAIFRLPHETAPRFVMQTSGTPSILRDIEELNGQQGFVIAPFRTNATSPLIVLRPDRTTFPEVNISMRKDGQEKAYPQKHISKNKVDYAHLFDRFHKPLANGELKKLVLSRSKIIDRKDTFSAGRSFFNAAEKYPHSYVYLFHTPQSGTWLGSTPEILLRGARDEWHTVALAGTRYPNSGTVTWDDKNLREQHLVTSYLLKQLSSFHITPEINGPYTIKAGKLAHLRTDLSFNLPETPKLGTLLKALHPTPAVSGLPKDEAYRFIQHNEEQDRLYYSGFLGMLDTEAETDIYVNLRCMHIEENSLTLFAGSGLLVSSSLDDEWEETEHKLEVMLNILQ

SEQ ID NO: 94656 - protein, 471 aa, unidentified
  source 1..471: note = Proteobacteria bacterium
  REGION 1..471: note = tr|A0A1Z9GYS5|A0A1Z9GYS5_9PROT Isochorismate synthase MenF OS=Proteobacteria bacterium TMED154; OX = 1986844 GN=menF PE=3 SV=1
MLASPQTLDPKAPSTLSKAIEDLLEQLDQLGKGKLGTSLTGEGIIRLETKASVEDPLSWLHTQKNNKKHFWREREGGETIAGVGECLVFESEHGSTIELMLQRIRRLLNNSSDGVRIFGGIRFNLSSDSISDEWKSWKQARFVIPEIELIRDGKETRLACNLNSVVLDKNRSLEGLRRRISELSEEDSNNILESNFQFLKKNHKPEYENWCDNVNQALSEIKSGTLNKIVLARKTEYQLQEAYDPLKFLLRLRDRAPNAYQYCFQFDKDQAWMGISPERLYKRQSRKIETEAVASTRPRGTNNEEDKNLALELLQSQKEVREHDLVLERIESVLNQFCDKITRKSYREILKLRQVQHLLSRIEGHLNPDHGESTLINAIHPTPAVCGIPDEKARLNIEQLENFDRGWYAGPVGWISKNGAEFAVGIRSAQIHHKTLRIYTGAGIVQGSDPDSEWNEIDAKLRNWESILEPA

SEQ ID NO: 94657 - protein, 443 aa, Proteus hauseri
  REGION 1..443: note = tr|A0A410X5J3|A0A410X5J3_PROHU Isochorismate synthase MenF OS=Proteus hauseri OX=183417 GN=menF PE=3; SV = 1
MEKVKPVFSTLYEKVKNINLTAQGNLLHLKVALASDVSFSLLSWLAAQTYYPQFYWQHRDEYEEIAACGQLCCFNHIRDAREFLNTHKNESNTDDVRIWGLNAWDTIIPGRIDQQSGDDAYLFLPRIEIRRQQQQLSVHINLLGEKDRDDALTFLSTLNNELEISPLSVSVISVKHSLTQDQWVNYLELALHEIEQGTFEKVVPARATCLTLDNPLKAIQFMKASRDVNHHCYHYMLAFSPSDAFIGSSPERLYYRDEKQLYTEALAGTVASSENEQQARELADWLMNDKKNQHENLVVVDDICQRLQGGIEGIDVSPADVIRLRKVQHLRRYIHGKLIDTDDVDCLKRLQPTAAVCGLPRTVARAFIHQHEPFKRRWYAGSAGYLGLSHAEFAVSLRCGELHDDTLTLYAGAGVVAGSSPLQEWDEIENKAAGLRTLLQEKK

SEQ ID NO: 94658 - protein, 113 aa, Proteus mirabilis
  REGION 1..113: note = tr|A0A379GG00|A0A379GG00_PROMI Menaquinone-specific isochorismate synthase OS=Proteus mirabilis OX=584; GN = menF_3 PE=4 SV=1
MMWIVYSVYNLPRLFGGLPRSIARTFIRQHEPFERRWYAGSAGYLSLPHAEFAVSLRCGELHDDALTLYAGAGVVAGSDPLQEWAEIENKAAGFAHFIRKRVLNSLQFIQWLS

SEQ ID NO: 94659 - protein, 443 aa, Proteus penneri
  REGION 1..443: note = tr|A0A379EN45|A0A379EN45_9GAMM Isochorismate synthase MenF OS=Proteus penneri OX=102862 GN=menF PE=3; SV = 1
MEKINPVFSTLYEKVKNINLTAQGNLLHLKVTLPSEVSFSLLSWLAAQVYYPQFYWQHRDESEEVAACGQLCCFNHIEDARQFLATHQSDINIDDVRIWGLNAWDTIIPGRIDKIKGDDAYLFLPRIEIRRHQQQLSVHLNMLDEDDKQNTLDFLQTLNQAEEIEPLSVSVTHVNHSLTQEQWTHYLNIALDEINQGLFEKVVPARATCLTLDNPLKAIQFMKASRDVNHHCYHYMLAFSSSDAFMGSTPERLYKRDELMLYTEALAGTVASSDNEQQATQFADWLMNDKKNQHENLVVVDDICQRLQGGVEGIDVSPADVIRLRKVQHLRRYIHGKLIHSDDIDCLKRLQPTAAVCGLPRSVARAFIRQHEPFERRWYAGSAGYLSLPHAEFAVSLRCGELHDDALTLYAGAGVVAGSDPQQEWTEIENKAAGLRTLLEKES

SEQ ID NO: 94660 - protein, 443 aa, Proteus sp.
  REGION 1..443: note = tr|A0A3D2BG11|A0A3D2BG11_9GAMM Isochorismate synthase MenF OS=Proteus sp. OX=229037 GN=menF PE=3 SV=1
MEKVKPVFSTLYEKVKNINLTAQGNLLHLKVALASDVSFSLLSWLAAQTYYPQFYWQHRDEYEEIAACGQLCCFNHIRDAREFLSTHKNESNTDDVRIWGLNAWDTIIPGRIDQQSGDDAYLFLPRIEIRRQQQQLSVHINLLGEKDRDDALTFLSTLNNELEISPLSVSVISVKHSLTQDQWVNYLELALHEIEQGTFEKVVPARATCLTLDNPLKAIQFMKASRDVNHHCYHYMLAFSPSDAFIGSSPERLYYRDEKQLYTEALAGTVASSENEQQARELADWLMNDKKNQHENLVVVDDICQRLQGGIEGIDVSPADVIRLRKVQHLRRYIHGKLIDTDDVDCLKRLQPTAAVCGLPRTVARAFIHQHEPFKRRWYAGSAGYLGLSHAEFAVSLRCGELHDDTLTLYAGAGVVAGSSPLQEWDEIENKAAGLRTLLQEKK

SEQ ID NO: 94661 - protein, 443 aa, Proteus vulgaris
  REGION 1..443: note = tr|A0A292C8A7|A0A292C8A7_PROVU Isochorismate synthase MenF OS=Proteus vulgaris OX=585 GN=menF PE=3 SV=1
MEKVNPVFSTLYEKVKNINLTAQGNLLHLKVTLPSEVSFSLLSWLAAQSYYPQFYWQHRDEHEEVAACGQLRCFNHIQDACKFLGLHHCDADSDDVRIWGLNAWDTIIPGHIDKIKGDDAYLFLPRIEIRRHQQQLSVHLNMLDEGDKQNTLDFLQTLNQAVEIEPLSVSVTHVNHSLTQEQWTHYLNIALDEISQGLFEKVVPARATCLTLDNPLKAIQFMKASRDVNHHCYHYMLAFSPSDAFMGSTPERLYKRDELMLYTEALAGTVASSDNEQQATEFADWLMNDKKNQHENLVVVDDICQRLQGGVDGIDVSPADVIRLRKVQHLRRYIHGKLIDSDDIDCLKRLQPTAAVCGLPRSVARAFIRKHEPFERRWYAGSAGYLSLPHAEFAVSLRCGELHDDALTLYAGAGVVAGSDPQQEWTEIENKAAGLRTLLEKEN

SEQ ID NO: 94662 - protein, 441 aa, Providencia alcalifaciens
  REGION 1..441: note = tr|B6XJ28|B6XJ28_9GAMM Isochorismate synthase MenF; OS = Providencia alcalifaciens DSM 30120 OX=520999 GN=menF; PE = 3 SV=1
MTKTKIDKLLTEILNHLSTLVLNPHEYTRLVWQMDTKEVFPGLAWLSAQDSYPQFYWYHRTGSEECSALGTVKSFNSITDAEQFIAEHAEMPDMRLWGLNGWNAVGEGISDALKRESAFYFLPRLEIFRLRSAVTVTLNIDGAEDIPHAMAFLQQLKSTSNTLSILSTEIIGQQHIPDHDEWCERLTGAIQDMRAGKMEKVVMARETILSLTQPITVAEFLSASQKVNHHCYHFMMAFSAHSGFMSSTPERLYLRQGTQLNSEALAGTVANHTDDVIAAENAKWLMEDSKNQHENLVVVDDICQQLQGAVTGIDVSSAKVIRLRKIQHLYRSIAATLLTPSDSDCLQRLQPTAAVCGLPRSVAREFLAQHEPFSRGWYAGTGGFVSLNRSEFAVSLRCAQIDNRQISLYSGAGIVRDSDPEQEWEEIENKAAGLKSLLKTH

SEQ ID NO: 94663 - protein, 445 aa, Providencia heimbachae
  REGION 1..445: note = tr|A0A4D7J477|A0A4D7J477_9GAMM Isochorismate synthase MenF OS=Providencia heimbachae OX=333962 GN=menF; PE = 3 SV=1
MNYKKIDNLITEILNHLSTLTLKSEAHTRIIWQLDGLLSFPSLAWLSEQSCYPQFYWYQRTGAEECSALGMVRSFSSITDAEQFLAQHVETPDIRLWGLNGWNAVGESIAEDIKQQATFCFLPRLEIFRLRSSVTVSINIEGEEDRLNAIAFLQQLKPAVQPSLSLSATIIAQEHIPEHVQWCHLLTNAINEMKAGKMEKVVMARETKLKLSNSISVAEFLSASQQVNHHCYHFMMAFSKNSGFISSTPERLYLRQGEQLNSEALAGTVANHVDDAIAAENAKWLMEDGKNQHENLVVVDDICQQLQGAVTGIDVSSAKVIRLRKIQHLYRSIVATLVSPSDSECLQRLQPTAAVCGLPRAAARDFLAKNEPFSRGWYAGTGGYVSLTKSEFAVSLRCAQIEGDRVSLYSGAGIVSGSDPEQEWEEIENKAAGLKSLFEHNEKPQ

SEQ ID NO: 94664 - protein, 444 aa, Providencia rettgeri
  REGION 1..444: note = tr|A0A264VPW6|A0A264VPW6_PRORE Isochorismate synthase MenF OS=Providencia rettgeri OX=587 GN=menF PE=3; SV = 1
MNYKKIDQLITEILDHLSTLTLKNQEFIRFVWQLDAQTAFPGLSWLSVQESYPQFYWYQRTGAEECSALGMVKSFDSIDKAQAFLSQYPDIPEMRLWGLNGWNAVGDGIPDEIKRQATFCFLPRIEIHRLRSTINVSINIEGEEDRLNAIHLLQQLKPASQVTLALNADIIAQEHIPTHDEWCRLLNCAIDDMKSGKMEKVVMARKTKLTLSKPIAVAEFLAQSQQVNHHCYHFMMAFNAHSGFISSTPERLYLRQDGQLNSEALAGTVANDPDDAVAAEYAKWLMEDKKNQHENLVVVDDICQQLQGAVTGVDVSSAKVIRLRKIQHLYRSIVATLITPSDSDCLQRLQPTAAVCGLPRKVARQFLAKNEPFSRGWYAGTGGFMSLNKSEFAVSLRCAQIEGAQVSLYSGAGIVSGSDPEQEWIEIENKAAGLKSLFENNEKP

SEQ ID NO: 94665 - protein, 441 aa, Providencia rustigianii
  REGION 1..441: note = tr|D1P5K6|D1P5K6_9GAMM Isochorismate synthase; OS = Providencia rustigianii DSM 4541 OX=500637; GN = PROVRUST_07514 PE=4 SV=1
MIYTKIEKLLAEILNHLSTLTLSPNEFTRLTWQFDIQGSFPGLAWLSEQEFYPQFYWYHRTGSDECSALGMVKSFNGITEVEHFLSTHAQWPDMRLWGLNGWNGVGDGISEELKRASTYYFLPRLEIFRLRSNATISLYINGEQDRLNAIEFLQKLKSPSQATLQLSVNIIGQQHIPEREEWCRLLTNAIQDMRAGKMEKVVMARETKLTLSHPISVAQFLSASQQVNHHCYHFMMAFSRDSGFMSSTPERLYLRQDYQLNSEALAGTVANHVDDSIAADNAKWLMEDSKNQHENLVVVDDICQQLQGAVMGIDVSPAKVIRLRKIQHLYRSIVATLLSRSDSDCLQRLQPTAAVCGLPRNIAREYLAKHESFSRGWYAGTGGFVSLNKSEFAVSLRCAQIDGESISLYSGAGIVSDSDPEQEWEEIENKAAGLKSLLGNV

SEQ ID NO: 94666 - protein, 444 aa, Providencia sp.
  REGION 1..444: note = tr|A0A4S2YPR5|A0A4S2YPR5_9GAMM Isochorismate synthase MenF OS=Providencia sp. MGF014 OX=2565573 GN=menF; PE = 3 SV=1
MNYKKIDQLITEILDHLSTLTLKNQEFIRFVWQLDAQTAFPGLSWLSVQESYPQFYWYQRTGAEECSALGMVKSFDSIDKAQAFLSQYPDIPEMRLWGLNGWNAVGDGIPDEIKRQATFCFLPRIEIHRLRSTINVSINIEGEEDRLNAIHLLQQLKPASQVTLALNADITAQEHIPTHDEWCRLLNCAIDDMKSGKMEKVVMARETKLTLSKPIAVAQFLAQSQQVNHHCYHFMMAFNAHSGFISSTPERLYLRQDGQLNSEALAGTVANDPDDAVAAEYAKWLMEDKKNQHENLVVVDDICQQLQGAVTGVDVSSAKVIRLRKIQHLYRSIVATLITPSDSDCLQRLQPTAAVCGLPRKVARQFLAKNEPFSRGWYAGTGGFMSLNKSEFAVSLRCAQIEGAQVSLYSGAGIVSGSDPEQEWIEIENKAAGLKSLFENNEKP

SEQ ID NO: 94667 - protein, 443 aa, Providencia stuartii
  REGION 1..443: note = tr|A0A140NFU5|A0A140NFU5_PROSM Isochorismate synthase MenF OS=Providencia stuartii (strain MRSN 2154); OX = 1157951 GN=menF PE=3 SV=1
MVYKKIDNLITEILHQLSTLALGNQEFIRLHWQLDGHSTFPGLAWLSAQSCYPQFYWYQRTGTDECSALGTVYEFNAITEAEQFLSLHAQYPDMRLWGLNGWNAVGEGISLADKQQATFYFLPRLEIFRVRSSISVYLNIKGEDDRLAAIAFLKQLKPAATLPPLNTQIIGHEHFPEKAQWCHLLNKAITKMRAGEMEKVVMARETKLTLSQPVSVAEFLAASQRVNFQCYHFMMALSQETGFLSSTPERLYLRQGTQLNSEALAGTVANHPDDAIAAEKAKWLMEDSKNQHENLVVVDDICQQLQGIVTGIDVSPAKVIRLRKIQHLYRSIAATLVSPSDSECLQRLQPTAAVCGLPRTVARQFLTEHEPFSRRWYAGTGGFVSLNKSEFAVSLRCAQIEHQRLSLFSGAGIVSDSDPEQEWIEIENKAAGLKSLLEPPEKP

SEQ ID NO: 94668 - protein, 405 aa, Pseudaminobacter sp.
  REGION 1..405: note = tr|A0A432V7T2|A0A432V7T2_9RHIZ Isochorismate synthase OS=Pseudaminobacter sp. CB3 OX=1851146; GN = EET67_08985 PE=4 SV=1
MRILSSSSQSAGEQRQPASGAEPTFRLRDAERAVVAQGVRAEVEPGAIDSFAERVCTFFAAHADGPRVIVGALPFDRSQADYLFQPETLVRVEGQVETLPAAAAVLEAPRCVIRPEPAPSAYRDAVAACLELIKRSAADVEPLTKVVLSRSLSLSSSHAFDAAGLLRALGQDRSVTVFSTLLPGERSGPQPLLVGATPELLVSKRGANVISHPLAGSARRYSDAAADRRSAAALESSEKDRREHQAVVDAVFDALSPYCRELAAPKGTTLRPTASMWHLGTRIVGTLKDSETPVTELAAVLHPTPAVCGLPRRRAAEVIGELEGYDRGFYAGAVGWTDEQGDGEWYVSIRSARIAGAQATLYAGAGIVAGSDPVAETDETSAKFVALLSALGIDEQGRPLRERAA

SEQ ID NO: 94669 - protein, 503 aa, unidentified
  source 1..503: note = Pseudanabaena biceps
  REGION 1..503: note = tr|L8MSQ4|L8MSQ4_9CYAN Isochorismate synthase; OS = Pseudanabaena biceps PCC 7429 OX=927668; GN = Pse7429DRAFT_4338 PE=4 SV=1
MQVRQSVTYSSIDSKSLHDWIVKAIAKAQIEGSPILFSYSQSWECANPLLLLASKTEVQQPKFYWEQPHANLILAAAGSVAEVSVPNNDRSDRFDCAKKFIKTHLANAILAKDPNLELVQSEISIHVVGAFSFYHNGSNSENWLDLAQANNYPQDSLPETEFPTLLFFIPRWMLRHKDRTCTLTLNHYIQPWDRADEVLERIENMRSHLQESSHYEAPTVHEVSKIVEVQGQQIWTEIVERALTLIHQGHFEKVVLARALDVLADRNFDPFQVLHVLRCEYPECISFLLDYGLGKTFLGATPEVVLQFKSYGDRFWLRSDALAGSIGRGKTVSEDRMLGENLLNSEKDMREHQFVIRSICDRLQSMGAAIDPQVNTGLLRLSNVQHLHTPITAQINDSDWLIALDILQQLHPTAAVGGEPRDRAVCFMQQWEACDRGWYAAPIGWLNGNGEGTFGVGIRAGYIQGDRARIFAGAGIVANSQVENEQSETTIKFAALLKALGAM

SEQ ID NO: 94670 - protein, 602 aa, Pseudanabaena sp.
  REGION 1..602: note = tr|K9SEE1|K9SEE1_9CYAN Isochorismate synthase; OS = Pseudanabaena sp. PCC 7367 OX=82654 GN=Pse7367_0213; PE = 4 SV=1
MHLELRNADLKTNSPSLQDLIEGAIAKAQNLGRSLILSYSYAWQEVDPLFFLGQKCQAGQYRFYWEQPQQNLAIAAGGMILVLPQVISTAAAEPDLTTEQEHDHDRFRRSREWSRQWLSDAVVGGQPNCQPLKPYIVGGFSFYDRPMHQTWPDFPTARLFVPRWLLRKTANLCTLAINSCICANDQPQQIEAELTDVYNVLKKEVIGNQAQDLTGDRPANLEPPMRLIDRNTASQVTQVELFPAPASNQGTPPAQSVQPVQFNRSGRDQKSRDNSSKFNPAIGSLHQTLAQDQTLAQDQILSQDQILAQNIEQNRRHSPKLLEINEINGDRPWTDAVKQAVGEIKAGKLDKVVLTRALELRVADQFEPNLVLDSLRQSYPECINFAINFGGQATFLGATPELLLQFEHEEEQLQLKSGAVAGSTGRSNSPDQDQEMGDRLLRSSKDLSEHRIVVKSICDRLGHLGAELEPIRSPQLLKLSNVQHLHTPIAAKLNVDDWFVAFDILGQLHPTAAVGGEPRQVAIEVMQSLEKCDRGWYAAPIGWVNGDGEGAFAVGIRSGYLDGNQARLYAGAGIVADSKFDAELGETKIKFDALFKALGIEN

SEQ ID NO: 94671 - protein, 389 aa, unidentified
  source 1..389: note = Pseudarcicella sp.
  REGION 1..389: note = tr|A0A2S2DSK9|A0A2S2DSK9_9BACT Isochorismate synthase OS=Pseudarcicella sp. HME7025 OX=2183547 GN=entC; PE = 4 SV=1
MVILILNMPNTLPQTLTSLLDWEQLWQHTQQKRGGMAVWRLPKSDKRYFLVDSTGGEKLGSLDLETFPAGFLVAPFIGLPYFLKAETLLEESIVQEEVVGSSLLKPLHNVEENEEKHQHFTHWVSESINEIQSGHFQKVVLSRTDEVEFPGDFSTLKAFGQLCQAYPNAFVCALYIPELGSTWLCATPETLVEQNAQGIFRTIALAGTQSAIDPLGEIILPQNARWSQKEIEEQAYVCRYIIECFKKIRLREYQEIGPKTILAGNLLHLKTEFTVDTQALNFSQLPGILLSLLHPTSAVCGTPKEEAIAWIAKAEKHARELYSGYLGPVNLGDEIHLFVNLRTVKVDQSEGKCRATYFAGCGITEDSDPEKEWQETVMKCQTLQRVLEN

SEQ ID NO: 94672 - protein, 470 aa, unidentified
  source 1..470: note = Pseudarthrobacter phenanthrenivorans
  REGION 1..470: note = tr|A0A3B0G0E7|A0A3B0G0E7_9MICC Isochorismate synthase OS=Pseudarthrobacter phenanthrenivorans OX=361575; GN = D7Z96_06270 PE=4 SV=1
MTSTFRTLTVPLDGQKFAGGLPSFLVRDDVLCWTRREAGLAGFGEIARFTATGPERFLEADIWWRHLVLEAEVDDAVELPGTGPVAFGSFAFSKTSAHESRLIVPEIVVGVRDGQVWLTQLTFDDGPLTEEGALAALDRWLGGGSTAAPDADRPGGSTTAAADAAGNGTPGAGPGKAGGAVVRPLPLAAGATLHTGSLSEEAWMAAVDAGVAEIRTGALEKLVLARDVVATVPSGVHAATVLRELAARYRECWTYGVDGLVGATPEMLIQVEGRTAQARVLAGTLDRRDAHGEDGLPMDYATRVLAGSEKQRHEHEIAIQSLTTQLAPFSEAMNAHDEPFILELPNVWHLASDVKAELTEVEGHVPTCLALINALHPTAAVCGTPTQVAGALIRKLEHLDRGPYAGPVGWLDAAGNGEWGIALRGAVIESPTSVRLYAGCGIVDGSQPEAELAETWAKFRPMLESLGISN

SEQ ID NO: 94673 - protein, 463 aa, unidentified
  source 1..463: note = Pseudarthrobacter sp.
  REGION 1..463: note = tr|A0A5C4IT10|A0A5C4IT10_9MICC Isochorismate synthase OS=Pseudarthrobacter sp. NamE5 OX=2576839; GN = FDW84_08140 PE=4 SV=1
MTSTLRTLTVPLDGEKFPGGLPAFLVRDDVLCWTRRESGLAGFGQIARFTASGPERFLEADIWWRHLVLEAEITDAIELPGTGPVAFGSFAFSKTSAHESRLIVPEIVVGVRDNQAWLTQLALNDGLLTEEGAHAALARWLGMSFTSAESTTAAADSAGDPGQGTVPAKAGGAVVRPLPLAAGATLHTGSLSEEAWMEAVAAGVAKIRTGALEKLVLARDVVASIPTGVHAATVLRELAARYRECWTYGVDGLVGATPEMLIQVEGRTAQARVLAGTLDRRDAHGEDGLPMDYATRVLAGSEKQRHEHEIAIQSLTSQLAPFSEAMNAHDEPFILELPNVWHLASDVKAELTEVEGHVPTCLALINALHPTAAVCGTPTQVAGALIRKLEHLDRGPYAGPVGWLDAAGNGEWGIALRGAVIEAPDTVRLYAGCGIVDGSQPETELAETWAKFRPMLESLGISS

SEQ ID NO: 94674 - protein, 401 aa, Pseudoalteromonas luteoviolacea
  REGION 1..401: note = tr|A0A541BJB3|A0A541BJB3_9GAMM Isochorismate synthase OS=Pseudoalteromonas luteoviolacea OX=43657; GN = FLM44_15680 PE=4 SV=1
MHAGEISNLAQAQSLGEFLLDQDCLFVSGNSCLLGHGIKHRFNIPIANTEYLVEELQSQLRAHQGDSDNAIAFGVLPFCKHQNAQFIIPKTVARWDKNVFSQWLNAQVTELDATNNSLQAVRYLQDRTHFEQTVKDAKSLFDSNQLEKIVLSKQVDLEFSKPLNRKHVLNQLLQQSQSGYHFAFPTQNDAVLMGVSPELLLRKQDQTVTSNPLAGSIPRDRCEKVEAQRRSVLFSSKKDRYEHAVVIDDMRQLLEPVCDNLQIPAEPDLLSTATMWHLSTVISGHLKDPQTHILDLANQLHPTPALCGKPTKPAYQHILDLEGHDRGLFSGIIGWCDQHGNGEWVVVIRCGELKAQVARLFAGAGIVAASDPNSEWLETEAKLKTMLNALSVQQAYSSFNK

SEQ ID NO: 94675 - protein, 406 aa, Pseudoalteromonas piscicida
  REGION 1..406: note = tr|A0A3B6XXP3|A0A3B6XXP3_PSEO7 Isochorismate synthase OS=Pseudoalteromonas piscicida OX=43662; GN = D0N37_00700 PE=4 SV=1
MLSEISALQSTNTTLESIDLSQQAFFVSGTRCLVTQRPHHRFTTQIKDHDVLVSQLKRELAKCSSNDAIAFGMLPFCKTQQAQFIVTEQAHQYDKETFKQWLNAKGTLKQDTMPSLERISHRQSQHHYESAIREAKKLFANEQLEKIVLGKQVDLYFDAPLSPETILTNLLTQSPSGFHFSFPTEQNSTLMGVSPELLLRKHGQAVLSNPLAGSAKRSNDKATEFKLKQALMASKKDRYEHAVVLVEMSQVLQPWCQKLTIPSSPSLLSTATMWHLSTEVEGQLADANTHVLALANRLHPTPALCGKPTADAYPWIHSLEGESRDFFSGIVGWCDKHGNGEWVVVIRSGEISANHARLFAGAGIVAASDPTAEWLETEAKLSTMLNALESNQTYHQLSQIKMRATA

SEQ ID NO: 94676 - protein, 406 aa, Pseudoalteromonas sp.
  REGION 1..406: note = tr|A0A4Q6Z351|A0A4Q6Z351_9GAMM Isochorismate synthase OS=Pseudoalteromonas sp. CO342X OX=1777270; GN = EXT47_00560 PE=4 SV=1
MLSEISALQSTNTTLESIDLSQQAFFVSGTRCFLTQRPHHRFTTQIKDHDVLVSQLKRELAKCSSNDAIAFGVLPFCKTQQAQFIVTEQAHQYDKETFKQWITAKGTLKQDTMPSLERISHRQSQHHYESAIREAKKLFANEQLEKIVLGKQVDLYFDAPLSPETILTNLLTQSPSGFHFSFPTEQNSTLMGVSPELLLRKHGQAVLSNPLAGSAKRSNDKAMEFKLKQALMASKKDRYEHAVVLVEMSQVLQPWCQKLTIPSSPSLLSTATMWHLSTEVEGQLADANTHVLALANRLHPTPALCGKPTADAYPWIHSLEGESRDFFSGIVGWCDKHGNGEWVVVIRSGEISANHARLFAGAGIVAASDPTAEWLETEAKLSTMLNALESNQAYHQLSQIKMRATA

SEQ ID NO: 94677 - protein, 430 aa, unidentified
  source 1..430: note = Pseudocitrobacter faecalis
  REGION 1..430: note = tr|A0A366FCG9|A0A366FCG9_9ENTR Isochorismate synthase MenF OS=Pseudocitrobacter faecalis OX=1398493; GN = menF PE=3 SV=1
MLSVSAALKSLADSLSDDFPASPGTRIIEVPFPLNDAFDPLCWLNAQTVWPQFWWQQRSGDDELAALGAAVSFSSLAQAEDFLTRYDADDARICGLNSFDYRQIALFLPRLEWRREGGRASLRVNLASETSLHADAVAAKAFITQLSSQSVCHTSALTLESELHRPGEAGWRGLIEQATLAIANGEFEKVVLARATDLTFTTPPDAGALMAASRRVNLHCYHFFMAFDAGQAFFGSSPERLWRRRGLELETEALAGTVASHPDPTQAQHLADWLMNDDKNQRENMLVVDDICARLQKHVDALDILPAEIVRLRKVQHIRRVIQATLKEASDDRCFMQLQPTAAVSGLPRTQACDFIDCFEPFSREWYAGSAGYISRCQSEFCVTLRSAKVSGNTVRLYAGAGIVAGSQADSEWQEIENKAAGLRSLLFSE

SEQ ID NO: 94678 - protein, 391 aa, unidentified
  source 1..391: note = Pseudocitrobacter sp.
  REGION 1..391: note = tr|A0A5B0K3Y9|A0A5B0K3Y9_9ENTR Isochorismate synthase EntC OS=Pseudocitrobacter sp. 73 OX=2605731; GN = entC PE=4 SV=1
METSLAVDTNEQQETLCADNFFFMSPYRSFTATGCFSRFSCPAAGGDALNSPFQQQLAAAFAEAKAAGIEKPVMVGAIPFDTNQPSSLFIPKQWQSFSRTGKQHSARYIASASPVGVTERHEIPQQPVFMEMVARAAALTDTPQVDKVVLSRLIEIATDRPLDSGVLLERLVAQNPASFNFHVPLENGGVLLGASPELLLRKEGSHFSSLPLAGSARRQPDDVLDREAGNKLLASEKDRHEHELVTQAMKATLAPRSRSLSLPETPQLITTPTLWHLATPIEGEANPVENALSLACLLHPTPALSGFPHLAAKQIIAELEPFERDLFGGIVGWCDAEGNGEWVVTIRCAEVNANTVRLFAGAGIVPASSPEAEWRETGVKLSTMLNVFGLQ

SEQ ID NO: 94679 - protein, 466 aa, unidentified
  source 1..466: note = Pseudogracilibacillus auburnensis
  REGION 1..466: note = tr|A0A2V3VHX8|A0A2V3VHX8_9BACI Isochorismate synthase MenF OS=Pseudogracilibacillus auburnensis; OX = 1494959 GN=menF PE=3 SV=1
MIELEEKTLQSFLYKAIDEAISLRKQPLFSWTKKIDKVDLIDVFQAAKNTKKDRLFWTNSSNDFALVGVGCTHKVIGHEDRFEQLQKEWKNILQEAIIHDHFKEVGTGLVALGGMSFDPKREKSGLWAKYPTSQLTIPAYMVVKNNSNYYLTMNRYLTNKDNIEQIIHEVNTMEKILLTETEHHHSTQKVIAKKEIAPNTWKKTVQKAVDEIKQNRAKKIVLAREMRLKLNKDANIAGMLKKLINTQPNSYIFAFEQDDNCFLGATPERLVQVQGDKLLSTCLAGTAPRGKTKEEDATIARSLLFDQKNREEHDYVVQMIKQNIEKYCEAIDIPKEPVIYPLRNLQHLYTPVTAKLKPSYTVFDIIKKLHPTPALGGVPREKALAFIREEERLDRGWYGAPIGWLDSNKNSEFAVAIRSGLIQKDEVSLFAGCGVMRDSDPEMEYDETNVKFLPMLHIMEANDESY

SEQ ID NO: 94680 - protein, 476 aa, Pseudomonas aeruginosa
  REGION 1..476: note = sp|Q51508|PCHA_PSEAE Salicylate biosynthesis isochorismate synthase OS=Pseudomonas aeruginosa (strain ATCC 15692 / DSM 22644 / CIP 104116 / JCM 14847 / LMG 12228 / 1 C / PRS 101 / PAO1) OX=208964 GN=pchA PE=1 SV=1
MSRLAPLSQCLHALRGTFERAIGQAQALDRPVLVAASFEIDPLDPLQVFGAWDDRQTPCLYWEQPELAFFAWGCALELQGHGEQRFARIEENWQLLCADAVVEGPLAPRLCGGFRFDPRGPREEHWQAFADASLMLAGITVLREGERYRVLCQHLAKPGEDALALAAYHCSALLRLRQPARRRPSGPTAGAQGDASAQERRQWEAKVSDAVSSVRQGRFGKVVLARTQARPLGDIEPWQVIEHLRLQHADAQLFACRRGNACFLGASPERLVRIRAGEALTHALAGTIARGGDAQEDARLGQALLDSAKDRHEHQLVVEAIRTALEPFSEVLEIPDAPGLKRLARVQHLNTPIRARLADAGGILRLLQALHPTPAVGGYPRSAALDYIRQHEGMDRGWYAAPLGWLDGEGNGDFLVALRSALLTPGRGYLFAGCGLVGDSEPAHEYRETCLKLSAMREALSAIGGLDEVPLQRGVA

SEQ ID NO: 94681 - protein, 469 aa, Pseudomonas amygdali
  REGION 1..469: note = tr|F3IC62|F3IC62_PSEAV Salicylate biosynthesis isochorismate synthase OS=Pseudomonas amygdali pv. lachrymans str. M302278 OX=629267 GN=PLA106_01325 PE=4 SV=1
MNPLPSFSDLQGCLTGGLMECLHSARAQVSTARPRVLASFSTPSPHVEPFGLFTANREQVQPACLWHVQAQGQYRLGLGLAHEFNAGPADSWQTLENRWRDMAATAVVRGDHRPTLFGGFAFDRRQPRTRLWRDFPDAALTLPRFELHESDGQTRLIVNVLIDEHSQCAALAEALAGEWAEILARPLPGAPASGDQFVRLSMAHLWKQDVFHAVNRIKRGGLEKVVLARSQNVAAASPLEQVMQRLMHKQPNAYLFAFARGSSCFMGASPECLLTVRGDQLHTMALAGTAPRGANSADDARLGEQLLLSEKDNSEHAMVIDCIRHGLAEHCLTLDIACRPRLHKLPHIQHLLTPVQATLAPNASLLGIAQSLHPTPAVGGLPRNEALDYIRSHEQLDRGWYAGPIGWLDDQGNGELAVALRSALLNGHRATLFAGCGLVSGSEPESEYRESDLKMQTMREALSGNGLPG

SEQ ID NO: 94682 - protein, 465 aa, Pseudomonas chlororaphis
  REGION 1..465: note = tr|A0A0D5XZS4|A0A0D5XZS4_9PSED Isochorismate synthase OS=Pseudomonas chlororaphis OX=587753; GN = PCL1606_27810 PE=4 SV=1
MSAFSQLAEHAPGLTRVFEQARQRAAGQGAPVLASYALAIGALDLLELFCKADQPHAESLFWRAADGGRSLFGWGVAAQLDGVGEQRFATVDRQWQHWLRSAVIHGPQPPAICGGFRFDPQVAPSETWQGFGDGSMLLMTLLLIRDGEQCWLVCQQRIAASDDPAGRCEHVLEQWNALMDRYLSPAASTAAPRHTGDHCLPRAAWEDKVAHALHVLRDSALNKVVLARQVRSEFSHAVNPGRTLARLAGNDPAAYLFAFRRQRACFIGASPERLAKLHDGHLQTLALAGTCRRDADPQRDAELARELLDCAKNRHEHAVVVQIIQSDLAPWVEHLQVPPTPAIQRLSRVQHLSTVIEGRLRPRASLLQVVATLHPTPAVGGHERQQAMAHIRQFEGFDRGWYAAPLGWLDARGNGEFIVGLRSALLDDRQACLFAGCGIVQCSDPASEYEETCIKLAGMQVALQA

SEQ ID NO: 94683 - protein, 389 aa, unidentified
  source 1..389: note = Pseudomonas entomophila
  REGION 1..389: note = tr|Q1IAK9|Q1IAK9_PSEE4 Isochorismate synthetase; OS = Pseudomonas entomophila (strain L48) OX=384676 GN=pmsC; PE = 4 SV=1
MRASTLMTTGMDEEQVADRSMAFSFTSGDRELVVNGALQRIDTPAVGGEDADSLLQKTLAHAFDQARRAGQANPLVVGAIPFDPSEPSCLYIARESHWRAREATAAGGELPTLVEQKPIPEEDAFKRSVEHAIVNFRHSDVRKAVLSVQRELVFADAVDVDVLQRNLRAQNPSGYHFRVPLADGATLLGVSPELLVRKEGANFISNPLAGSARRMADPEADKRNADWLVASEKDHYEHGFVTQDIAARVGELCTRLDVPQRPSLISTPALWHLSTRIEGNLIDPQVTALQLACRLHPTPAVCGFPTERARRLIRFVEPAERGQFTGMVGWCDAEGNGEWVVTIRCGTVKHNRVRLFAGAGIVEASQPAAEWAEVQTKLGTMLRACGLAH

SEQ ID NO: 94684 - protein, 475 aa, Pseudomonas fluorescens
  REGION 1..475: note = tr|A0A0D0TAI9|A0A0D0TAI9_PSEFL PchA protein; OS = Pseudomonas fluorescens OX=294 GN=pchA PE=4 SV=1
MNAADLLTVFQAAHQRAVAYQRPVIAVSAHPAPTLAPLALYAAHRQGFLWCAHSPDLSLFGLGCAWQIEACGPGRMAEVDRQWFALCADALVQGPYPPLLLGGMRFDEQQPCASHWAPFADASFHLAHWLLSEDATGRWLRCQRVVEASSDPAALVHESVAAYEQLLNPAPHVTSTPDVLERRALPRHQWQAKVETALHAIARGELNKVVLARHIDHHLDATLDTGAVMGRLHARRNASHLFAIHRGEHCFMGATPERLLSCDAGRLTTHALAGSTRRGLWPDEDQALGERLLADPKEQHEHRLVVQTITQALHDKVTDLHAAPCPGLLKLATVQHLSTPITAQLNVGKRLLDGVQALHPTPAVGGLPRAPALGFIREHEGFDRGWYAAPVGWLDANGNGDFLVALRSALITPRHCHAFAGCGIVEGSLPANEYEETQIKLASMQQALQLACPADTDVAYSQTRDETPYASTAQR

SEQ ID NO: 94685 - protein, 472 aa, Pseudomonas fuscovaginae
  REGION 1..472: note = tr|A0A0N1J5L9|A0A0N1J5L9_9PSED Isochorismate synthase OS=Pseudomonas fuscovaginae OX=50340; GN = PF66_05929 PE=4 SV=1
MSPFIDRTALLDCLEQARQRATDQQRPVLACFSCRWPACDGLRAFAAAWGFTQAVLWQFAESGPAMVGVGRALELGLQQDQSLVELQQAWQRWMAEAVIVGPQRPRLFGGRTFDRENPCSEQWRAFTEAAFVLPRLSRQGEHLLLASQIDEQTDCQALCQELLDDLYYWWETEQGRPVTTLQPGRNPRVRESLPAEEWKARVKRALADIESRQLHKVVLAREVRIQADTPFSLPRILQALAQGNPGAYLFAFRRGDSCFLGATPERLVLQQAGQLRTTALAGSIPRGTCAQSDRANHDRLLASAKDRHEHALVVETLRSDLRRFTAELQVPEVPVVHRLKHIQHLMTPIHGRLLPEVPLLAVVEALHPTPAVGGLDRQAAIRWIRRHESLHRGWYAAPVGWLDSEGDGEFAVALRSALVRGEQAWAFAGCGLVAGSEPELEYRETCVKLRTMLDALAPGLSENLVEASRLQA

SEQ ID NO: 94686 - protein, 472 aa, Pseudomonas orientalis
  REGION 1..472: note = tr|A0A3G7X4K9|A0A3G7X4K9_9PSED Isochorismate synthase OS=Pseudomonas orientalis OX=76758 GN=C4J97_4304; PE = 4 SV=1
MNTLKQSSYANPYPNLNAHELGAALLPVLERRFPQLAGEFMGLFSQHTDGVRTSMVGLGSEFRVVVTHDGTHLTLQLQHEQAVCLAQTLALDASRLFHEQLFDAVARFVEQLCPWLMQKHGLPACATFLGGWRCATHPEHLSEPLVFTLPRLFCRISDEQLTFSCLHDDIWYAIDDRLIASAADFTPTANPRIIKREDIPACADYVDDLVGLLNELACTDADKVVIGREVKLTLERPISPALLLRLVAPRPNPHYEFVFRWADQVAWVGISPETLLRKENDLLVVEPLAGTRKGSSEGEKNARYRHELTSDLKELEEHETAAGLFLEQLATVCENGSLDLRESRSVIDLGYVQHLKSLISGTVKAGLNVFDALAAVYPPATIWGKPLAVCGERIRRYEQIDRGFFTGGLGYFTLGDDANFALAIRTVKLTESHIHVYAGSGIVKASDPYREWLETSNKMKPYLANEYVWNIS

SEQ ID NO: 94687 - protein, 526 aa, unidentified
  source 1..526: note = Pseudomonas protegens
  REGION 1..526: note = tr|A0A2C9EP50|A0A2C9EP50_PSEPH Salicylate biosynthesis isochorismate synthase PchA OS=Pseudomonas protegens (strain DSM 19095 / LMG 27888 / CHA0) OX=1124983; GN = pchAPE=4 SV=1
MRRCSRNVGNGPSRRAWTRCSWCRCLPRSSTGTLPSKCATGAVSTGWIKEPKMSESCLSGLTRALRKGESLARRRGRAVLVVYSLAAERLEPLRLFAANRQVFGQSLFWSSDQGALALAGFGCTEEISPPAAERFAASTQAWRQLLLQAHQVGPKRAYLCGGFAFDPQGPRSAQWQSFAATSLVLPRILLLREGEQQHWLFSLWVEPGADVAQCAGALEAEWALLQARYTHAPLAQMPVGTQAEDDTQAAGRWQDCVARAIARIQGGELSKVVLAREVCLRASRSIPCGPLLENLRAAYPQAFLFAFSRGDSCFLGATPERLVRLARGTLNTVALAGTCARGQHEQQDAELGQALMDSAKDRHEHALVVQTLREALQPYCAMLEIPPQPQLHRLAHVQHLLTPVLGRLRPQVDLLQVVDALHPTPAVGGLPRGKALGYIREHEQLDRGWYAAPVGWLNAEGDGEFAVALRSALIRGNQAHLFAGCGIVGESDPASEYQETCLKLRTIGEALRPQPAATYEKLGLSL

SEQ ID NO: 94688 - protein, 464 aa, Pseudomonas savastanoi
  REGION 1..464: note = tr|Q48HP7|Q48HP7_PSE14 Isochorismate synthase; OS = Pseudomonas savastanoi pv. phaseolicola (strain 1448A / Race 6) OX=264730 GN=pchA PE=4 SV=1
MSRLPSFSGLQTCLQAAQAQVSAHHPWILASFSTPSLQVEPLGLFTANREQVQPACLWCVQAQGRYRIGLGLAHEFNAGPADSWQTLEKRWRNMAVTAVVHGEHRPTLFGGFAFDRQQSSTRLWRDFPDAALTLPRFELRESDGRPQLIVNVLIDQHSQCDQLAGKLVDEWVEILGRPVPSESMASDRFVRLSMAHLWKQDVFNAVNRIKRGGLKKVVLARSQNIPVVNPLQQVMQHLMLRQPNAYLFAFARGNSCFLGASPECLLTVQGDQLHTMALAGTAPRGTNSAEDARLGEQLLASEKDNSEHAMVIDCIRHGLVEHCLKLDIACRPRLHKLPHIQHLLTPVQATLAPNASLLGIVQSLHPTPAVGGLPRNEALDYIRSNEQLDRGWYAGPIGWLDDQGNGELAVALRSALLTGQRATLFAGCGLVSGSEPESEYRESDLKMQTMREALGQLPHNAAWM

SEQ ID NO: 94689 - protein, 471 aa, Pseudomonas sp.
  REGION 1..471: note = tr|A0A3G7APD8|A0A3G7APD8_9PSED Menaquinone-specific isochorismate synthase OS=Pseudomonas sp. CMR12a OX=658629; GN = C4K39_5481 PE=4 SV=1
MNEACLPGLTRALQDAEAQARREGRAVLVVFSQAAERLDPLRLFASNRQVFGQSLFWSGDQGALAMAGFGCTEEISPPAAERFAASTQAWRQLLERAHQVGPRKAYLCGGFSFDPEAVRGALWQSFADTSLVLPRILLLREGDQQHWLFSLWIEAEADVDQCAAAIAAEWNLLQARYAHGPRLQVPACSQPQDLDSGAQQWQATVAGAIERINAGALNKVVLAREVCLQAERNIPCGALLENLKAAYPQAFLFAFSRGDSCFLGATPERLVRVARGTLNTVALAGTCARGVHEQQDAELGQRLLDSPKDRYEHALVVQTLREALQPFCAMLEIAPQPQLHRLAHVQHLLTPVLGRLRPQVELLQLVQVLHPTPAVGGLPRASALEYIREHEQLDRGWYAAPVGWLNAEGDGEFAVALRSALIRGNQAHLFAGCGIVAESDPQSEYRETCLKLRTIGEALRPTSSTPGMQAG

SEQ ID NO: 94690 - protein, 336 aa, Pseudomonas stutzeri
  REGION 1..336: note = tr|A0A4P9E393|A0A4P9E393_PSEST Isochorismate synthase OS=Pseudomonas stutzeri OX=316 GN=FEV13_02740; PE = 4 SV=1
MQQAFDDARRAGLSTPAVVGVIPFDKAQPSRLFVPRHLAFLPPSAPPTAICGLPCGAARSCIEQPGRAGFHDAVNQALDLLREGRIDKAVLSRLLQLEFDEPPCAQTIFQGLRQQNPEAYHFAVDLPGEGVLIGASPELLLRKQGRAFSTNPLAGSARRSPDPLADEEAARALLDSAKDQHEHRLVIEDLERQLRPLCRTLNVPPTPALLKTARLWHLSTRIDGELYDELSALRLACQLHPTPALCGFPTAAAKQVIAELEPFDRGVFGGIVGWCDAAGNGEWAVVIRCGIIQQTRVRLFAGAGLVSASCPEAEWRETGTKLGTMLAAFGLDKEAV

SEQ ID NO: 94691 - protein, 475 aa, Pseudomonas synxantha
  REGION 1..475: note = tr|I4KTI9|I4KTI9_9PSED Isochorismate synthase, PchA family OS=Pseudomonas synxantha BG33R OX=96901; GN = PseBG33_2337 PE=4 SV=1
MNAADLLKTFQAAHQRAVAYQRPVIAVSAYPAPTLAPLALYEAHRQGFFWCAHSPDLSLFGLGCAWQIEASGPQRMAEVDRQWFALCADALVDGPHPPLLLGGMRFDEQQPCASHWAPFADASFHLAHWLLSEDSHGRWLRCQRVVEPGSDPAALAQASLAAHEKLLNPATHVAPAPHVVERVALPRDQWQAKVDTALHVIARGDLSKVVLARHIDHHLDAALDTGAVMGRLHARRNASHLFAIHRGEHCFMGATPERLLSCEAGRLTTHALAGSTRRGCKPNEDQALGKRLLADPKEQHEHRLVVQTITQALGDKVSDLHAAPHPNLLKLATVQHLSTPITARLNAGKRLLDGIQALHPTPAVGGLPRAPALDFIREHEGFDRGWYAAPVGWLDAEGNGDFLVALRSALITPRHCHAFAGCGIVEGSLPANEYEETQIKLANMQQALQLACPADTDVAYSQTRGETPYASTAQR

SEQ ID NO: 94692 - protein, 261 aa, Pseudomonas syringae
  REGION 1..261: note = tr|S6TV41|S6TV41_PSESF Salicylate biosynthesis isochorismate synthase (Fragment) OS=Pseudomonas syringae pv. actinidiae ICMP 18807 OX=1194404 GN=A244_20521 PE=4; SV = 1
RGDHRPTLFGGFAFDRRQPRTRLWRDFPDAALTLPRFELHESDGQTRLIVNVLIDEHSQCDPLAEALAGEWAEILARPLPGAPATGDQFVRLSMAHLWKQDVFHAVNRIKRGGLEKVVLARSQNVAAASPLEQVMQRLMRKQPNAYLFAFARGSSCFMGASPECLLTVRGDQLHTMALAGTAPRGVNSADDARLGEQLLLSEKDNSEHAMVIDCIRHGLAEHCLALDIACRPQLHKLPHIQHLLTPVQATLAPNASLLGIA

SEQ ID NO: 94693 - protein, 465 aa, Pseudomonas veronii
  REGION 1..465: note = tr|A0A1D3JY50|A0A1D3JY50_9PSED Salicylate biosynthesis isochorismate synthase OS=Pseudomonas veronii 1YdBTEX2 OX=1295141 GN=pchA PE=4 SV=1
MRAFAQLHAHAEEMTEVFEHAQRRAVEQGEPVLASYSMRIAPLDLLALFGSVDQPGAECLFWRAPEDDKSLFGWGVAAELSSAGPQRFASVDAQWRHWLQSAVIHGPLAPSVCGGFRFDHQVKASPAWQGFGDASLWLMTLLLVRDGADCWLVCQQRVAPSDAARCCCEHVLKEWNTLMDRYVSGAPSTAARQHTRDQSLPRACWESKVAHALDVLRDTALNKVVLAREVVSEFSRPISAGRTLAALAINDPTAYLFAFRRHHACFIGASPERLVKLHDGHLQTLALAGTARRDPCPEQDAQLAQTLLDCQKNQHEHAVVVQIIQRDLAPWVRPLHVPPAPHIKRLSRVQHLATLIEGALRPQSSLLDMVAVLHPTPAVGGHERGQALEHIRQFEGFDRGWYAAPLGWLDAQGNGEFIVGLRSALLNGNQARLFAGCGIVEHSDPASEYDETCIKLAGMRAALQV

SEQ ID NO: 94694 - protein, 465 aa, unidentified
  source 1..465: note = Pseudomonas wadenswilerensis
  REGION 1..465: note = tr|A0A380SYL8|A0A380SYL8_9PSED Salicylate biosynthesis isochorismate synthase OS=Pseudomonas wadenswilerensis OX=1785161 GN=pchA PE=4 SV=1
MRAFTRLEEHTAGLTQVFEQARQRAAVQGAPVLASYALAIVELDLLELFCRVDQPDAESLFWRAADGGKSLFGWGVAAELSGAGGQRFAMVEQQWQQWLHSAVIHGPQPPALCGGFRFDHQVEASSAWQGFGDASMLLMTLLLIRDGDQCWLVCQQRIGPSDNADSRCEHVLNEWNGLMDRYLSPPVTLAPPQHTRDQCLPRACWESKIAHALDVLRDSPMKKVVLAREVISEYSHAISPGRTLVRLASNDPSAYLFAFRRQQSCFLGASPERLVKLHDGRLQTQALAGTIRRDPDPQQDAQLAQALMDCEKNRHEHALVVQIIQSGLAPWASQLQVPSTPAIQRLSRVQHLSTLIEGRLRPQAGLLQVVATLHPTPAVGGHERRQAMEHIRRFEGFDRGWYAAPLGWLDARGNGEFIVGLRSALVNGKHARLFAGCGIVHCSEPASEYEETCIKLAGMQLALQA

SEQ ID NO: 94695 - protein, 336 aa, unidentified
  source 1..336: note = Pseudomonas zhaodongensis
  REGION 1..336: note = tr|A0A3M2HNA2|A0A3M2HNA2_9PSED Isochorismate synthase OS=Pseudomonas zhaodongensis OX=1176257; GN = EA797_15225 PE=4 SV=1
MQRAFADAQAAGLANPVLVGVIPFDKRQPSSLFIPRHVSHLSPTSPPTAICGFPCGSARKCIEHPNQAGFQQAVNRALGALRNGRLDKAVLSRLLQLEFDVPPCPATIFQGLRQQNPEAYHFYADLPEGGVLIGASPELLLRKIGQRLETNPLAGSARRHADPLADDDAAQRLLDSAKDQHEHRLVIRDMERQLRPLCHELHIPETPSLMATAKLWHLSTRIEGELAEPISALNLACQLHPTPALCGFPTAAARQLIAELEPFDRGVFGGIVGWCDAAGNGEWAVVIRCGVIDQHKVRLFAGAGLVSASCPESEWRETGTKLRTMLAAFGLDREVA

SEQ ID NO: 94696 - protein, 415 aa, Pseudonocardia autotrophica
  REGION 1..415: note = tr|A0A1Y2N9U4|A0A1Y2N9U4_PSEAH Salicylate biosynthesis isochorismate synthase OS=Pseudonocardia autotrophica OX=2074 GN=pchA PE=4 SV=1
MTVAPATTALRVRTRPLRLDGPLLDTLPGDSGELCWVRGDEGLVGWGEVARFTGSGPDRFAEADRWWSSVVDGLDDHTDDVRLPGTGAVAFASFTFTDDSPGSVLVVPRVVVGRRGNRAWITEITPADAPFAATALRPPSPVRPGGRLRYADGDVPAHRYRVAVAEAVRRMRAGELAKAVLAHDLLAHADAPLDARFLLHGLARRYPTCWSFAVDGLVGATPELLLRRAGQIVESRVLAGTMWPSGSGDDVGAALYGSAKDRREHAYAVDSLAATLRPLVAELTVPETPAVLTLPNVSHLASDVRARLDPARPASLLTLIGAVHPTAAVGGTPTPDATALISEIEGLDRGRYAGPVGYLDADGGGEMGIALRCAELQGRTARLFAGCGIVADSDPDAEVREAAAKMRAVRDALEG

SEQ ID NO: 94697 - protein, 401 aa, Pseudonocardia dioxanivorans
  REGION 1..401: note = tr|F4CYY0|F4CYY0_PSEUX Isochorismate synthase; OS = Pseudonocardia dioxanivorans (strain ATCC 55486 / DSM 44775 / JCM 13855 / CB1190) OX=675635 GN=Psed_5577 PE=4; SV = 1
MDDPGRLLDLLPDDRPLSWVREGEGLVGWGEVARFTGTGSGRFAEADAWWRSFTARLDVRDEVGVPGTGAVAFASFTFADRSPGSVLVVPRVVVGRRDGRTWITEFAGDGVRTAMRQAVPVRVGGALRYDDGDMTVADYRGAVAEAVRRMRAGQPQKAVLAHDLLAVADQPLDARFLLAGLAHHYPTCWAYSVDGLVGATPELLLRREGEVVSSRVLAGTIWPGDDPAGAGTDIGAALLASAKDQREHAFAVDSLAATLRPHCRTLDVPSEPSILALHNVSHLSSDVRGVLRDGASLLTLVADVHPTAAVGGTPRTEALQVIAELERMDRGRYAGPVGWIDAAGDGELGIALRCAQLDGNTARLFAGCGIVADSDPDSEVREAAAKLVAVREALEGTLVGG

SEQ ID NO: 94698 - protein, 418 aa, Pseudonocardia sp.
  REGION 1..418: note = tr|A0A1Q8LBC1|A0A1Q8LBC1_9PSEU Menaquinone-specific isochorismate synthase OS=Pseudonocardia sp. Ae706_Ps2; OX = 1885035 GN=Ae706Ps2_4515c PE=4 SV=1
MTVAPASTALRVRTRPLRLDGRLLDALPADAGALSWVRDGEGVVGWGEVARFTASGPERFAEADRWWRRVVDRLDAGAGYDDVRLPGTGALAFASFTFADGCPGSVLVVPRVIVGRRGHRAWITEITTADAPETPGRLPVPSPVRPSGRLRYADGQVSAHRYRAAVASAVGRMRDGELEKVVLAHDLLAVADRPLDPRFLLRGLARRYPTCWSYAVDGLVGATPELLLRLRGRTVESRVLAGTMWPGSGPDADTAGALIGSSKDRREHTYAVDSLAESLRPLVAELHVPDAPTVLTLPNVSHLSSDVHARLDPSRPASLLTLVGAVHPTAAVGGTPTPDATALISEIEGLDRGRYAGPVGWVDAEGTGEMGIALRCAELQGRTARLFAGCGIVADSDPDGEVREAAAKMRAVRESLEG

SEQ ID NO: 94699 - protein, 396 aa, unidentified
  source 1..396: note = Pseudonocardiaceae bacterium
  REGION 1..396: note = tr|A0A431NP82|A0A431NP82_9PSEU Isochorismate synthase OS=Pseudonocardiaceae bacterium OX=1873463; GN = EKK42_01945 PE=4 SV=1
MDDVGRLLDLLPDDRPLSWVRDGEGLVGWGEVARFTGTGAGRFAEADAWWRSFTARLDVRDDLQLPGTGAVAFASFTFADRSPGSVLVVPRVVVGRRDGHTWITEFAGDGVPAAMRRAMPVRAGGALHYDDGDMTVARYRRAVAEAVARMQAGELDKAALAHDLLAVADEPLDPRFLLAGLAHHYPTCWAYCVDGLVGATPELLLRREGDTVSSRVLAGTIWPGNGGDDIGAQLMASGKDQREHAFAVDSLAATLRPHCATLDVPAEPSILALHNVSHLSSDVRGTLRDGSSLLTLAADVHPTAAVGGTPRAAALRVISELERMDRGRYAGPVGWVDAAGDGELGIALRCAQLDGNTARLFAGCGIVADSDPDTEVREAAAKLVAVREALEGSVTG

SEQ ID NO: 94700 - protein, 383 aa, unidentified
  source 1..383: note = Pseudooceanicola marinus
  REGION 1..383: note = tr|A0A1X7A9N7|A0A1X7A9N7_9RHOB Isochorismate synthase EntC OS=Pseudooceanicola marinus OX=396013; GN = entC PE=4 SV=1
MPINDMQRDACKRASDAGLPFALWRDPFGRSFTALISTTQPENEPVFGDQTAPGFVMAPFDTEDGSQAWTLPADVVISDDGPLYRDGIALVDHPVSTAQRRITDPAHTPPSALRTPDGESPDPTDRETYMERVSRAVARIRAGDCDKIVLSRIDPRTLPEDRDLLDLAEGLAELHPHAFVCLVSSGPTGTWLTATPEILLANDENGIRTMALAGTQWPEPETDIASLTWPQKIIDEQALVADYIREAFAAEGFEDVDETAPYTVRAANLCHLRSDFSAPAGSQEALGRLLGRLHPTSAVCGMPKEAARAFIMEEEGPTRRFYTGYLGPRGLNGGTQLYVNLRSASISGNQIFLHVGGGIVEASDPAMEWQETVEKTKTISAVL

SEQ ID NO: 94701 - protein, 478 aa, unidentified
  source 1..478: note = Pseudopropionibacterium propionicum
  REGION 1..478: note = tr|A0A448N0X6|A0A448N0X6_9ACTN Isochorismate synthase dhbC OS=Pseudopropionibacterium propionicum; OX = 1750 GN=dhbC PE=4 SV=1
MGWDTLLTNHPEMPRKSRLTRDDALFFNNVKRSLFATIRLDVPISTIDPSGLREPASAIVPRVSLDFATKRLRATTVAIDDPGDLAHFLTPERATAFLRRGEGFVTLGEVARFETDSPDAADVWWSEVSAHIDHDSELPGAWGTGPLAVGSFAFDPDRSRVRSVLIVPETIIGRRSGQAWMTRISEGRLSLDLPAMGEPVAPPENVRLTPDGLSGPDWVDIVAEAVERIRAHEISKVVLARSLRAVTDGPIDPRHVLRRLLRAYPMAWNYLVDGMVGATPELLVRRDRTLITSRVLAGTVSLDPGHTDPLRRAEQLAGSGKDIAEHEFAVASVAEALEPYCAAMNVPEAPSVLTLPNVMHLATDITGVVEPDISSLALAGALHPSAAVCGTPTFFAGEVIAELESMDRGRYAGPVGWVDSDGDGEWAIALRGGFVNPAHPEEIRLFAGAGIVADSDPQAELAETEAKFKPMLQALGLA

SEQ ID NO: 94702 - protein, 410 aa, unidentified
  source 1..410: note = Pseudopuniceibacterium sediminis
  REGION 1..410: note = tr|A0A399IYW7|A0A399IYW7_9RHOB Isochorismate synthase OS=Pseudopuniceibacterium sediminis OX=2211117; GN = DL237_13145 PE=4 SV=1
MTPSRHRVAPSPAPVDLSARTAPFLFQGPDGAIGATGTLHPLPRGPLATLPDRISRAMEGMAPTGLIGGALPFDRDADDCLWMADQTSRTPIAARTQPEIAPTWTVTPEPSAEAYAEAVQQALDLMKNQANLPQPLRKIVLARTLALVCDQVIPVPSVLARLCQDASVTAFQVALPPSTDTGPDTVTDTATDTDGARLLVGASPELLVRKSGAQILSHPLAGSARRRSDAAQDRAAAQALTASAKDLREHAIVVEFILDTLAPHCTTLTAPSVPEITSSATMWHLGTPIRGELRDADMPSVQIAGLLHPTPAVCGSPRDRAAQIIQQLEPVARDFYAGAVGWTAANGDGAWYVSIRCAEIQGRSARLYAGAGIVPGSVPAQEAAETGAKFAALLRALGLPHDMAIPTDPH

SEQ ID NO: 94703 - protein, 345 aa, Pseudozobellia sp.
  REGION 1..345: note = tr|A0A3B0CA08|A0A3B0CA08_9FLAO Isochorismate synthase OS=Pseudozobellia sp. CCMM003 OX=2419782; GN = D7Z94_11090 PE=4 SV=1
MSLALMDKVSAQFRDRLPFVVYRKPNHTQVTALFQKDDTLHSVSDFTETGFVMAAFEWKPTVLLRPDEKHEADFDFGTPPNCKSGTEIQIDLEQKKVHLDLVQKGIAAIQQGDLKKVVLSRKIEMDFNENPLELFQSLLPTYPNAFCYLWFHPNTGLWLGATPEILLQVRNREFNTISLAGTLPYSGNDQVVWGRKELKEQDLVTDYILDVLRDKASDIKKGELESVKAGNLLHLRTKISGVFLEDGLGSVIRFLHPTPAICGFPKQPALDFIHDNENYDREFYTGFLGELNFDAETKLYVNLRCAQIKENKVVVYTGGGITQDSDPEKEWDETVAKSKTLLQLI

SEQ ID NO: 94704 - protein, 453 aa, unidentified
  source 1..453: note = Psychrobacillus lasiicapitis
  REGION 1..453: note = tr|A0A544T9A5|A0A544T9A5_9BACI Isochorismate synthase OS=Psychrobacillus lasiicapitis OX=1636719; GN = FG382_10590 PE=4 SV=1
MPKTTGQKQTTLRFYTETIEVSRLSAHAFFEAGDEKYKGQRFFWQNKEKTLTLVGLGHAHTISNNLADNRYADINSKWKELCNASVKEQVDVSPILFGGFAFDPKNTITSEWDNFPSAFFVVATFQLVIQQDRTFVSIHYITNEEESADIFERLRVERDALIHTAQVKELQTHSKPALVKREDRLKEQYLHAVEDVTKRIREDEVNKVVIARSLKLMFDQDFSPATAIYHAAMEQPESYLFGLENGDQMFFGATPERLVKVENSKAQSAGLAGSVKRGKNSVEDKALGEALLADPKNLGEHKYVVDMIRKVFAQYCKELKVPARPKLMKIRDIQHLYTPIEGHLKKDSSLFALVQALHPTPALGGEPRQEAISIIRESEQMNRGYYAAPIGWINTEGDGEFAVGIRSALIENEYAYLYAGGGIVAESSSMEEFEETRVKFRPMLRTLGGNMND

SEQ ID NO: 94705 - protein, 460 aa, unidentified
  source 1..460: note = Psychrobacillus soli
  REGION 1..460: note = tr|A0A544TB47|A0A544TB47_9BACI Isochorismate synthase OS=Psychrobacillus soli OX=1543965 GN=FG383_10920; PE = 4 SV=1
MNTEVILMPKTTGQKQTTLRFYTETIEVSRLSAHAFFEAGDEKYKGKRFFWQNKEKTLTLVGLGHAHTISNRLEDNRYADIDAKWKELCSASLKEQVDVSPILFGGFAFDPKNKIASEWDNFPSAFFVVATFQLVIQHDQAFVSIHYITNEEESADVFERLRIERDALIHTAQVKELQVHAKPVLVNREDKGKEQYLHAVEDVTKRIRAEEVEKVVIARSLKLTFDEDFSKATAIYHAAMEQPESYLFGLENGDQMFFGATPERLVKVENEKVQSAGLAGSVRRGKNSVEDKALGDALLADPKNLGEHKYVVEMIRKVFTQYCKDLKVPARPKLMKVRDIQHLYTPIEGHLKKDSSLFALVQALHPTPALGGEPRQDAINIIRESEQMNRGYYAAPIGWINTEGDGEFAVGIRSALIENEHAYLYAGGGIVAESSSIEEFEETRVKFRPMLRTLGGNMND

SEQ ID NO: 94706 - protein, 453 aa, Psychrobacillus sp.
  REGION 1..453: note = tr|A0A5J6PUE4|A0A5J6PUE4_9BACI Isochorismate synthase OS=Psychrobacillus sp. AK 1817 OX=2303505; GN = D0S48_19100 PE=4 SV=1
MPNTTGQNKTTLRFYTETIEVSRMSAHAFFEAGEDCYKGKRFFWQNKEKTFTLVGLGHAYVLANDLEKNRYQDIAQKWEELCACSLIEKADVSPILFGGFSFDPANKISSEWNSFPSSFFAVATFQLVIRDDQAFVSIHLITEEQDSSAAFEHLRIERDTLIHTAQVKELKVHEKPQLLQREDRLKDEYLSAVEAVTNRIRNKEVNKVVIGRSLKLTFENSFSSSTAIYNASMEQPESYLFGLEKEDKIFFGATPERLVKLEKGKVESAGLAGSVRRGTNLEEDKKLGDALLADNKNLMEHQYVVSMIRKVFDQYCEQVKIPSRPKLMKIRDIQHLFTPIEGKIKGSSSLFEFVEAMHPTPALGGEPRQEAIEIIRESEQMNRGYYAAPIGWVNAEGEGEFAVGIRSALIENQYAYLYAGGGLVSESTSLEEFEETRVKFRPMLRTLGGNMND

SEQ ID NO: 94707 - protein, 432 aa, Psychromonas ingrahamii
  REGION 1..432: note = tr|A1SRV3|A1SRV3_PSYIN Isochorismate synthase MenF; OS = Psychromonas ingrahamii (strain 37) OX=357804 GN=menF; PE = 3 SV=1
MLTAEHNFNLMVIFIREQLQQFAIKQGDKPSCNLVIPLTPFDLLGLLKGQSLDSDALYPRIYWEDIEHLQTIACFGAIDECTYIPEPIGEACYFGGLAFQQQGVQWADFPEILFIRPALEFTLEQQKLRLTCHFNGANSIEKSLLLINCLQKPVSPDAVNNIVVSREDLPNRQQWAELVESAIEYKALIPKVVLSRQTELICEQKVNQWDLINQWQEANPNSFHFAFQFSTNHTFIGCSPERLFSRENNRLKTEALAGTVNRGREPREDAILRQSLLSDKKIDRENYLVQEFIVSSLKRLKAEVTCSEPHVMQLLNVQHLRVEINAKLNAQTKDAHLLHNLHPTPAVGGCPKLPALQFINDKEHYNRGWYAGTVGYLRVDKSDFSVAIRSALVSSNKIKLFAGAGIVVGSIADQEWQELENKIHTILDILSV

SEQ ID NO: 94708 - protein, 422 aa, Psychromonas sp.
  REGION 1..422: note = tr|A0A2N0WZB5|A0A2N0WZB5_9GAMM Isochorismate synthase MenF OS=Psychromonas sp. psych-6C06 OX=2058089; GN = menF PE=3 SV=1
MIEKISDKLRQLRQRVGEYPTKNLNITLEPLSLLAFLKAQKEITPAIFWQDKAHQRRVVCLGAIDDINHIPEINDEARYYGGLAFQQQGKQWQNFPAVRFIRPALEFSEENSVLTLICHFDGNTSIETTLLLLATLRPSAPLNNISTQITSRNDSPNQQHWAELVDLAIEYKALLPKVVLSRQTELICETQLDYCDLLAQWHEANPNSFLFSFKFAKDNVFIGCSPERLFERSDNKLQTEALAGTVNRGRNEREDNILLQSLLTDKKIDRENYLVQEFIIANLKRLKAQVSCEEPHVLQLHNVQHLCVPIHAQLPPETSDAELLYRLHPTPAVGGSPKLPALQFINDNEPYLRGWYAGAVGHLSANHSDFSVAIRSALLTEKRIKLFAGAGIVTGSIAEQEWQELDNKIHTILDIITLKGEQ

SEQ ID NO: 94709 - protein, 392 aa, unidentified
  source 1..392: note = Puniceibacterium sp.
  REGION 1..392: note = tr|A0A0J5QDJ1|A0A0J5QDJ1_9RHOB Isochorismate synthase OS=Puniceibacterium sp. IMCC21224 OX=1618204; GN = IMCC21224_111853 PE=4 SV=1
MAQHEDILRLGEGRVQGAVQDNRALLRVGGISGFGRRGGAIAAHAAELAKAATGLFARSDAPPVVLGALPFDPGAPGFLIAPEEVHIVDAAAEDRPAAVAEPLQGTDLTFRESPSREAYAAHVAEALVAIAAGDLDKVVLARALDVEGGEAFDIATLVGRLASDSSTVPYCLPLPGSNATLVGASPELLVSRTGRNVLSHPLAGSARRRRDAVADRAAAAALNGSLKDRHEHALVAEHVRDILAPFCRQLTPEIAPTLSATPAMWHLGSRIEGELKDAHTPVLDLVAALHPTPAVCGSPTAAAASAISRLEPVPRGYYAGAVGWSDAQGDGAWHVAIRCAVVQGASARLFAGAGVVAGSDPAAEAEETAAKFGTLLAALGLSPRLLLQGRTG

SEQ ID NO: 94710 - protein, 475 aa, unidentified
  source 1..475: note = Puniceicoccaceae bacterium
  REGION 1..475: note = tr|A0A368B733|A0A368B733_9BACT Isochorismate synthase OS=Puniceicoccaceae bacterium OX=2026784; GN = DBX01_06795 PE=4 SV=1
MQIIPSSMLPERDEGALRQFLEGCRDTARAKDHFQIASISLAVKHIAPLAVLQSIYEPEEVHCYIERAADDEAVAAAEAVVQERFDGVERFALVKAFAEEILENTIAVGDLSEAFTGPHFFTAFSFDDSVPEGAAFPAATVFLPRWQVSRSKGKYGAVANLKIEADTDIDSLVMRVWGAYRKFGAFDYLPDEVKEPSPQPKIESRRELASELYPNAVECALEAIEEGNYEKIVLARGIELLADRPWQPLDTLNRLRERFAGCFTFSFSGDTASSFIGATPERLLQIRHGRLLTEAIAGSAPRGQTASEDAKHARALLESGKDLREHTCVRDSILRRLEKVGVRGKAESNPQLLLLANVQHLRTRIEAEVGDAVHLLDILPEMHPTPAVGGSPREAALLCIADLEQIDRGLYAGVVGWFNHLNEGEMVVGIRSALIEGKQACLYAGAGIVEGSDPDKEMRETEMKLRALLDVLSSS

SEQ ID NO: 94711 - protein, 407 aa, Pusillimonas ginsengisoli
  REGION 1..407: note = tr|A0A4U5LLM8|A0A4U5LLM8_9BURK Isochorismate synthase OS=Pusillimonas ginsengisoli OX=453575; GN = D7I39_00035 PE=4 SV=1
MPTETGTPVPHNTAATQQSLPARGWMLDDFARGDVFFASPTTQWRSQASKGALSAMEPVSVSVVQSLFDEARQRGLTEPVLFGLVPFDTSKAASLTIPLAYERADVPDSNTATHSAASGQTAKPHILGRTPVPAPEAYGDMVRKALTLFAEGDLKKVVLSRAMDIELDQPPNYPQLLQDLLRRNAHGYTFALPIWGDGGTSLASGVMVGASPELLVRREGDRIFVNPLAGSIGRNSDPDTDAALKAGLARSEKDLREHAYVVNDIERILREYCDELDVPSGPSVIGTDTLWHLSTFITGQLRDPAVTALQLSCALHPTPAICGQPTDKAFEHIHHLEPFDREYFAGLVGWQRANGDGEWALTLRCAMHTEPTRLRVYAGAGTVAGSDPESEIAETATKMETFIRALG

SEQ ID NO: 94712 - protein, 407 aa, Pusillimonas sp.
  REGION 1..407: note = tr|A0A5A9XAZ4|A0A5A9XAZ4_9BURK Isochorismate synthase OS=Pusillimonas sp. ANT_WB101 OX=2597356; GN = FQ179_16795 PE=4 SV=1
MPTESGASEPHNTATTEPSLPARGWMLDDFARGDVFFASPATQWRSKASLGALSAIEPVSVSVIQSLFDEARQRGLTDPVMFGLVPFDTSKPASLTIPLSYECAGVPDNDTVMRSLDSDHTAKPQIVGRTPVPPPEIYGDMVRKALTLFAEGDLKKVVLSRAMDIDLDQPPNYPQLLQDLLRRNAHGYTFALPIWGDGGTSLASGVMVGASPELLVRREGDRIFINPLAGSIGRNSNPDTDAALKAGLARSEKDLREHAYVVNDIVRILHEYCDELDVPPGPSVIGTDTLWHLSTFITGQLRDPAVTALQLSCALHPTPAICGQPTGKAFEHIRQLEPFDREYFAGLVGWQRANGDGEWALTLRCAMHTEPTRLRVYAGAGTVAGSDPDSEIAETATKMETFIRALG

SEQ ID NO: 94713 - protein, 456 aa, Quadrisphaera sp.
  REGION 1..456: note = tr|A0A5C8ZKS4|A0A5C8ZKS4_9ACTN Isochorismate synthase OS=Quadrisphaera sp. DD2A OX=2593304; GN = FMM08_00330 PE=4 SV=1
MTTTVGRSSRPPQPRSLEPGSPGAVRARLRWRTTRVSDPGPLLDVLTRRSPSSSPLAWVRREEGLVGWGEAARVEAGGEHRFATAAAAWRDLVLGAPVVDDVHLPGTGPVAFTSLSFDAASAGGGVLVVPEVLVGRRGDVVWVTTAEPVDAPVGAVGSVAQTAVAAGDPVEPVSGPGAVRYADGALCGPRWATAVARAVARIQAGELEKVVLARDLVAEAEHEVDPRWLLARLAEAYPSCWSFSVDGLVGATPELLVRRERGLVHSRVLAGTIRRTGDEERDASLAGSLARSGKDLEEHEYAVRSVVSALAPHCRTTTAPDAPFVLHLPNVMHLASDVTGVLDDARPGGAPGVLELAAALHPTAAVCGTPTSAAAALIAELEGMDRDRYAGPVGWVDGSGDGEVGLALRCARIDPDDARRVRLFAGCGVVAGSDPMAELAESDAKLVPVRDALGGA

SEQ ID NO: 94714 - protein, 471 aa, unidentified
  source 1..471: note = Quasibacillus thermotolerans
  REGION 1..471: note = tr|A0A0F5IA81|A0A0F5IA81_9BACI Isochorismate synthase MenF OS=Quasibacillus thermotolerans OX=1221996; GN = menF PE=3 SV=1
MSTIKSEPIKAAFTKLVRQKPMNKQPALFSYVEKVDWIDPLLFYKNGASVYKGERFFWKDRDGQVEMVGLGNIYTLRSEEGDEARYEEVEKKWNNMIKCAVVHNPYTALGTGPALFGGFSFDPNRPQAEEWAKFSSAFFYLPEYMLTVYEGNCYITINILCRPEELHSLIDHLESRKDEVLTHTDTTALELPASLLKKEEYHQAQWIKGVNEAVERMEADTELKKVVLARKIVASFDQAVSHDGVLERLIAQQPDSFIFSLEAMDSCFLGASPERLVRKRGEKVLSTCLAGSIKRSKNPEEDEALGKELLNDEKNRKEHDYVVQMIKEEMEGLCKHVSIPSAPELMKVRDIQHLHTPVVGLTEAACSILQFVEKLHPTPALGGLPNDKALPIIRQLEGMDRGLYGAPVGWVDSQGNGEFAVAIRSGLLEKEKAFLYAGCGIVADSDPDSELAETQIKFRPMLRALGGSSDE

SEQ ID NO: 94715 - protein, 445 aa, Rahnella aquatilis
  REGION 1..445: note = tr|H2IP50|H2IP50_RAHAC Isochorismate synthase MenF; OS = Rahnella aquatilis (strain ATCC 33071 / DSM 4594 / JCM 1683 / NBRC 105701 / NCIMB 13365 / CIP 78.65); OX = 745277GN=menF PE=3 SV=1
MKQISAIIEQLDTRLAGEWPATAGIRQFSYSLQKQPDTGLLEWLAAQPCYPKFYWQQRDGNEEAAVCGDAYSFGNTAQAQAFIRQFPDVPDLHIWGLNAFNGAEDGTSTHNALFLPRIELCRQGNTWWLRCTIFSPHSLRAEARRTRLFLRSLVASRALPPIASRVLQHQHLPAQSQWKPLIDRALSGIEQHQFDKVVLARKTTLTLSQPLNACAFLAASRNVNHHCYHFMLAFTPHQAFLGSSPERLFLRDNTELYTEALAGTVANHPDDQEAQTLGDWLLSDGKNQRENLLVVDDICQRLQGGAHSLDVTPAEILRLRKVQHLRRNIHGELTEPDDAGCLQRLQPTAAVAGLPRQAARAFIAEFEPFDREWYAGSAGYLSAEQSEFTVALRSAAVKGHHLELYAGAGIVAGSDAAQEWQEIENKAAGLRTLLEEHYAPAVQAG

SEQ ID NO: 94716 - protein, 406 aa, unidentified
  source 1..406: note = Rahnella inusitata
  REGION 1..406: note = tr|A0A419M8G8|A0A419M8G8_9GAMM Isochorismate synthase OS=Rahnella inusitata OX=58169 GN=D5396_13105; PE = 4 SV=1
MDAVVTDGKSNGAGLVGEQCPEVAKNIADISPASGFFFTSPFRSLATQGCFTQLTLPAAGGEALNGEFQQAIAQAFIQARNAGIAHPIVCGAIPFDTQQPSALFVPKEVQWFDRQQFLDNAPVSQNALPQVKRKTEHPAQTEFMQMVSSAVEATERGALRKVVLSRLLKIETRQPVDRAALMARMIEQNPGGYHFHVPLAQGALLGASPELLLRKLGNHFHSNPLAGSAKRSADLRKDHAASQALLVSGKDAYEHHIVTDAMRDVLTPRCSHLHIPSRPELLSTPTLWHLASPIDGDVADSAENALSLACLLHPTPALCGMPTTSARELISRLEPFERGLFGGIVGWCDAQGNGEWVVTIRCGTVEANRVQLFAGAGIVPDSVPESEWAETGTKLNTMLRAFGLAS

SEQ ID NO: 94717 - protein, 445 aa, Rahnella sp.
  REGION 1..445: note = tr|A0A2N0W5D0|A0A2N0W5D0_9GAMM Isochorismate synthase MenF OS=Rahnella sp. AA OX=2057180 GN=menF PE=3; SV = 1
MKQISAIIEQLDTALTGEWPDAAGIRQFSYSLQKQPDTGLLEWLSSQPCYPKFYWQQREGNEEAAVCGDAYAFGNIRLAQAFIRQHHDVPDLHVWGLNAFNGADGSALAANALFLPRIELCRQGTTYFLRCTVFSTTSLRDEMRRTRLFLRSLVVSHALPPITSRVLQHQHLPAEPQWNQMIARALAGIEQQQFEKVVLARKTTLTLSQPLNACAFLAASREVNHHCYHFMLAFTPQQAFLGSSPERLFLRDHFELYTEALAGTVASHPDNHEAQALGEWLLNDGKNQRENLLVVDDICQRLQGGAHSLDVMPAEILRLRKVQHLRRSIHGELTESDDAGCLQRLQPTAAVAGLPRQAAREFIAEFEPFDRQWYAGSAGYLSTEQSEFTVALRSAAVKGNQLELYAGAGIVAGSDAAQEWQEIENKAAGLRTLLEEHYTPAVQAG

SEQ ID NO: 94718 - protein, 445 aa, unidentified
  source 1..445: note = Rahnella woolbedingensis
  REGION 1..445: note = tr|A0A419NBG5|A0A419NBG5_9GAMM Isochorismate synthase MenF OS=Rahnella woolbedingensis OX=1510574; GN = menF PE=3 SV=1
MKQISAIIEQLDATLAGEWPDTAGIRQFSYSLQKQPDTGLLEWLSAQPCYPKFYWQQRDGNEEAAVCGDAYAFGDTAQAQAFIREHQDVPDLHIWGLNAFNGADNSAFAANALFLPRIELCRQGTRYWLRCTLFSPRSLREEARRTRLFLRSLVASQALPPIASRVLQHQHLPAQPQWNQLITRALNCIEEQQFDKVVLARKTTLTLSQPLNACAFLAASRAVNHHCYHFMLAFTPQQAFLGSSPERLFLRSHDELYTEALAGTVANDPDDDKAQDLGNWLLNDGKNQRENLLVVDDICQRLQGGAQSLDIMPAEILRLRKVQHLRRSIHGELTESDDAGCLQRLQPTAAVAGLPRQAAREFIAEYEPFDREWYAGSAGYISAEQTEFTVALRSAAVKGHHLELYAGAGIVAGSDAAQEWQEIENKAAGLRTLLEEHYTPAVQAG

SEQ ID NO: 94719 - protein, 431 aa, unidentified
  source 1..431: note = Raoultella electrica
  REGION 1..431: note = tr|A0A514ENR8|A0A514ENR8_9ENTR Isochorismate synthase MenF OS=Raoultella electrica OX=1259973 GN=menF; PE = 3 SV=1
MLSVSTALERLRDCLSDDFPPSSGTRIFDIPFPLHDAFDPLLWCGHQAQWPQFYWQQRNGDEELAALGAVKIFPSLAEAHGFLQRQGLADLRICGLNAFNPQEGTLFLPRLEWRRVGGKATLRLLLSSETSLREEASAAREFLQALTPEQAQPAALPPVLSEQHSPDYPQWYALIEQATQAIAAGEMDKVVLARATDVRFALPPDPLAIVAASRRSNHRCFHFMMAFNAQRTFFGSTPERLWRRRGTLLRTEALAGTVASHPDDRQAQLLADWLMKDDKNQRENMLVVEDICQRLQDDVRSLDVLPPQVVRLRKVQHLRRCIWAELYRPDDTRCLHQLQPTAAVAGLPRRAALAFITRHEPFIREWYAGSAGYLALAQSEFCVALRSALVENATLRLYAGAGIVSGSDPEQEWQEIENKAAGLRSLLLTKA

SEQ ID NO: 94720 - protein, 431 aa, Raoultella ornithinolytica
  REGION 1..431: note = tr|A0A4S3RN99|A0A4S3RN99_RAOOR Isochorismate synthase MenF OS=Raoultella ornithinolytica OX=54291; GN = menF PE=3 SV=1
MLSVSTALERLRDCLSDDFPPSSGTRIFDIPFPLHDAFDPLLWCGHQAQWPQFYWLQRNGDEELAALGAVKTFPSLAGAHDFLQRQGLADLRICGLNAFNPQEGRLFLPRLEWRRVGGKATLRLLLNSETSLREDAIAARAFLQALTPDQAQPAALPPVLSEQHSPDYPQWHALIEQATQAIAAGEMDKVVLARATDVQFAAPPDPLAIVAASRRSNHRCFHFMMAFNAQRTFFGSTPERLWRRRGTLLRTEALAGTVASHPDDRQAQLLADWLMKDDKNQRENMLVVEDICQRMQDEVRSLDVLPPQVVRLRKVQHLRRCIWAELSQPDDTHCLHQLQPTAAVAGLPRRAALAFITRHEPFTREWYAGSAGYLSLAQSEFCVALRSAQVENATLRLYAGAGIVSGSDPEQEWQEIENKAAGLRSLLLTKT

SEQ ID NO: 94721 - protein, 391 aa, Raoultella planticola
  REGION 1..391: note = tr|A0A2X2E5W5|A0A2X2E5W5_RAOPL Isochorismate synthase EntC OS=Raoultella planticola OX=575 GN=entC PE=4; SV = 1
METSLAEDVQEQKMTLLPESFFFMSPYRSFRTAGCFSRFSHSAADGALLDGEFQRNMAAAFTDAKAAGIRKPVMVGAIPFDTNQPSELFIPESWENFSRTGKQQSARYFTAQTPMDVVERQEIPQQDAFMAMVERAAGLTATPEVDKVVLSRLIDITTRERVDSGALLERLIAQNPASFNFHVPLSDGGVLLGASPELLLRKEGDHFSSLPLAGSARRQPDDVLDREAGNKLLASGKDRHEHELVTQAMKAVLTPRCRELSLPDSPQLVTTPTLWHLATPIEGTALAQENAMSLACLLHPTPALSGFPHQVAKRLIAELEPFDRQLFGGIVGWCDDEGNGEWVVTIRCARLHQRTLRLFAGAGIVPASSPLGEWRETGVKLTTMLNVFGLN

SEQ ID NO: 94722 - protein, 391 aa, Raoultella sp.
  REGION 1..391: note = tr|A0A509CNI3|A0A509CNI3_9ENTR Isochorismate synthase OS=Raoultella sp. NCTC 9189 OX=2583577 GN=entC; PE = 4 SV=1
METSMAEDVREQKMTLAPESFFFMSPYRSFSTSGCFRRFSHSAAGGDALSGEFQQKMAAAFQEAKAAGIRKPVMVGAIPFDTRQPSELFIPERWETFSRTGKQRSARYASGQAAMDVVARQEIPEQDAFMAMVERASALTATAEVDKVVLSRLIDITTRDRVDSGALLERLIAQNPASFNFHVPLSDGGVLLGASPELLLRKEGDSFSSLPLAGSARRQPDDVLDREAGNKLLASGKDRHEHELVTQAMKAVLAPRCRELSLPDSPQLITTPTLWHLATPIAGTAAAGENAMSLACLLHPTPALSGFPHQAATRLIRELEPFDRQLFGGIVGWCDDEGNGEWVVTIRCARLQQNTLRLFAGAGIVPASSPLGEWRETGVKLTTMLNVFGLY

SEQ ID NO: 94723 - protein, 48 aa, Raoultella terrigena
  REGION 1..48: note = tr|A0A3P8JPW7|A0A3P8JPW7_RAOTE Isochorismate synthase entC OS=Raoultella terrigena OX=577 GN=entC_1; PE = 4 SV=1
MTIRCARLQQNTLRLFAGAGIVPASSPLGEWRETGVKLTTMLNVFGLY

SEQ ID NO: 94724 - protein, 372 aa, unidentified
  source 1..372: note = Rathayibacter tanaceti
  REGION 1..372: note = tr|A0A166I2V3|A0A166I2V3_9MICO Isochorismate synthase OS=Rathayibacter tanaceti OX=1671680 GN=dhbC PE=4; SV = 1
MSGRGETLRLEFSGPGRLREAAETWRALAASATVDDPLGLPGTGLVAFGAFTFSSDSRATSVLIVPRTIVGSRDGRSWLTRIAPVGSSLPDLPVEQALGQEYRVALEPGAMSPEAYRAAVASAVATVRAGHLEKVVLARDLTGRLPRDADLRRVLGTLASGYPDCWTFAVDGFVGASPETLVAVDRGIVSARVLAGTSARGADAADDAAAASALLASAKDRSEHAFALASLLHELHPHTRELSAGAEPFTLRLPNLWHLATDVRGLLGDASTALDLVGALHPTAAVAGTPTTEALALLKRLEPFDRGRYAGPVGWIDGHGDGEWAVGLRSAEVSPDGTITAWAGAGIVADSDPDSELAETGMKLRPMLDALG

SEQ ID NO: 94725 - protein, 473 aa, unidentified
  source 1..473: note = Reinekea forsetii
  REGION 1..473: note = tr|A0A2K8KL90|A0A2K8KL90_9GAMM Isochorismate synthase MenF OS=Reinekea forsetii OX=1336806 GN=menF PE=3; SV = 1
MSEQYLESGRPQLRPKPALTNGPKNAFQRAVHQLTSRLAQLTPSLNQLIHISIDIPAIDLLGWLADNPHPEQSYWQNRDSQFALAGLDRALVIEATEFSQVDRVMADIKTALEQASSIGTGAVFLGGIGFDSGMTGPWQAFKAVSFQAPLCFVQQRHGQFELGFNLYSATRSSWHQQTKRLTQLLAGLCFDTPPKPVAKNAIVHRQDSLSLAAWRDRVAQTLSAIANGQIQKAVLARRVDLRLAHAANLPDLLSRWRDLNPASFSFLLSQSGTRFLGCSPERLFVRRHQRLDTEAIAGTLPRGRNRADDLFYGRQLLTDPKLRREHRLVSDFIGQQLAPFCTEIDTEHKAHVLKLSAIQHLCQPIQANLQPGVANHQLVQALHPTPAVCGYPRQAAKDLIDRLEPVERGWYSGAVGVVSDAGAEFAVAIRSALCRDNRLFCYSGVGIVDGSVAEQEWYELESKLQTLLELIEQ

SEQ ID NO: 94726 - protein, 445 aa, Renibacterium salmoninarum
  REGION 1..445: note = tr|A9WRT2|A9WRT2_RENSM Isochorismate synthase; OS = Renibacterium salmoninarum (strain ATCC 33209 / DSM 20767 / JCM 11484 / NBRC 15589 / NCIMB 2235) OX=288705; GN = RSal33 209_2639 PE=4 SV=1
MNKANQQQSCRAGTLGFVLRSLTVPLADVSSSNPPSGLLAGLLTQDSLCWVRRDEGLVGIGTVAEFTVRGHNRFDEAKTWWAELTGNAEIENPVGIAGSGPAAFGSFTFSKLSKQDSTLRLPRLVVGLRDGVAWLTINSTQAEVTEQMAHEELARWRESITPSEAPGGSFEIATGALSEPEWTEVVAEGIRAIKERSLEKVVLARDIVVRGSRPIDRPTVLSQLMNQYRECWTYEVGNFIGATPEMLIKVEAGVARARVLAGTVDRAGAPNSSSYAQEMLMESAKQRQEHEIAIKSLIGQLAPFSIDLHFPAEPFILELPNVWHLASDVSAELAASNHHLPSSLALVEALHPTAAVCGTPRLEAGALIRELENFDRGPYAGPVGWLDAAGNGEWGIGLRGAVLENEYEARLYAGCGIVEASDPEAELAENWAKFRPMLQALGAQK

SEQ ID NO: 94727 - protein, 417 aa, Rheinheimera sp.
  REGION 1..417: note = tr|A0A437QIX3|A0A437QIX3_9GAMM Isochorismate synthase OS=Rheinheimera sp. KYPC3 OX=1834037; GN = EOE67_14715 PE=4 SV=1
MCPADICCSASQLTDDLAAADNMLLAPSGNPRWTDSKLLQGYLPAQSCIVAAGSQFLLTHGCYAQFQLPTNSPGLALLLQDKLAAAKADGVVEPVLIQLIPFDPGQNASFLIPRQVERIGADKLTTRLQQQAKTSAPLRLGHNKAAEFTRQVRQAVQLLQQPKLKKLVLGRAIECHSEQLDLADCLLSLLQQNPGAATFAVPLPGGEVWFGASPELLLARHGNQIRTQPLAGTCRRDLTDLTRDQAQAEVLRHSPKDRYEHQLVVQQISEVLAPYCKILQVPAEPSLLATSRLWHLASDIQAELVNADIPSLDILQLLHPTAAVCGQPTAAAREAIRQIETYQRDFFCGAVGWQDLAGNGQWQVMIRCARAKAGQLTLYAGAGIVSASEPAAELAETNAKFATMLGALGLPELTEAC

SEQ ID NO: 94728 - protein, 372 aa, Rhizobium etli
  REGION 1..372: note = tr|A0A1L5P9Q2|A0A1L5P9Q2_RHIET Isochorismate synthase protein OS=Rhizobium etli 8C-3 OX=538025; GN = AM571_PA00027 PE=4 SV=1
MNARFDLTTPGYRLRARGVAQRIDPDHWDGASVADAVDAALAAANGKTSDGAKRIVVGLVPFDTSRKAVFYVPEEAEFHTDYPAASLPREERRNVFEIHGADSPSYRENVTEALKRIQSGALDKVVLARSVTVDFNSPIDIDAVYARLCARNGSAYVYRVDLPDSLEQKTSSVLLGASPELVLSSDKGKIRSTPLAGSTPRAANALADEEVARALLNSRKDLAEHSMVVKAVGETFRQFADKVDVPSTPQLVQTPVIWHLGTYITGMLRENVSPIALAYALHPTPAVGGWPQDAARKTIAELEDFDRGFYAGLIGWMDEDGNGEWVLTLRCGIVNGSKATVFAGAGIVAGSDPEKEHTETSTKLQTFINALG

SEQ ID NO: 94729 - protein, 391 aa, Rhizobium pusense
  REGION 1..391: note = tr|A0A4U1JVJ5|A0A4U1JVJ5_9RHIZ Isochorismate synthase OS=Rhizobium pusense OX=648995 GN=CFBP5496_16400; PE = 4 SV=1
MKTGALRTNDVESDEIADFNRDFLFTSGTGQLRAKGIRERIRLPARGGEDTGSPLQQAIKAAFERARRAGQDNPIAIGAIPFDVSEPSCLYIPNNHEWSPRETAPVVADSAMPALVGQNSLPDETGFKRAVEHAIVNFRHSDVRKAVLSVMRELTFASEVNVERLLASLAKQNREGYQFRIPLPDGGDLIGVSPELLIRKQGENIISNPLAGSAKRMVDPAADKANAERLSASEKDHYEHSLVIEDIRSLLSPVCAELDVPEKPSLINTAALWHLSTRIEGRLADPETNALQLACLLHPTPAVCGFPTERAHRLIRFVEPFERGLFTGMVGWTDSEGNGEWVVTIRCGTVQRKTVRLFAGAGIVEASEPESEWAEVQTKLKTMLNACGLSA

SEQ ID NO: 94730 - protein, 391 aa, Rhizobium radiobacter; identical to SEQ ID NO: 93239
  REGION 1..391: note = tr|A0A5B8KP17|A0A5B8KP17_RHIRD Isochorismate synthase OS=Rhizobium radiobacter OX=358 GN=CG010_023255; PE = 4 SV=1

SEQ ID NO: 94731 - protein, 391 aa, Rhizobium sp.
  REGION 1..391: note = tr|U4QCB4|U4QCB4_9RHIZ Isochorismate synthase 1; OS = Rhizobium sp. IRBG74 OX=424182 GN=entC PE=4 SV=1
MKTGALRTNDVESDEIADFNRDFLFTSGTGQLRAKGIRERITLPARGGEDTGSPLQQAIKAAFERARRAGQDNPIAIGAIPFDVSEPSCLYIPNNHEWSPRETAPVVADSAMPALVGQNSLPDETGFKRAVEHAIVNFRHSDVRKAVLSVMRELTFASEVNVERLLASLAKQNREGYQFRIPLPDGGDLIGVSPELLIRKQGENIISNPLAGSAKRMVDPASDKANAERLSASEKDHYEHSLVIEDIRSLLSPVCAELDVPEKPSLINTAALWHLSTRIEGRLADPETNALQLACLLHPTPAVCGFPTERAHRLIRFVEPFERGLFTGMVGWTDSEGNGEWVVTIRCGSVQRKTVRLFAGAGIVEASEPESEWAEVQTKLKTMLNACGLSA

SEQ ID NO: 94732 - protein, 316 aa, Rhodobacter capsulatus
  REGION 1..316: note = tr|A0A4U1JN67|A0A4U1JN67_RHOCA Isochorismate synthase (Fragment) OS=Rhodobacter capsulatus OX=1061; GN = FBT96_18520 PE=4 SV=1
RPAPPPPPAPRPRPQPPARGYIDSVARALEIMRREDGLPEALQKIVLARTLLVEEAQAFPMREVLARLSEDPSVTAFQVSLPARADQGAPRHLVGATPELLLQKRGATILSHPLAGSARRCEAREADARAAQALARSEKDQREHRLVVDYILDLLAPDCAELSTPEGTALTKTRSMWHIGTRITGRLKDPDTPAVVLAARLHPTPAVCGLPCARAAGLIRSLEPVERDFYAGAVGWCDRRGDGDWHVAIRCAELCGAQARLYAGAGIVLGSEPRAEAAETGAKFGALLAALGLPRDAALLDLPRDAALLDLDPRHD

SEQ ID NO: 94733 - protein, 401 aa, Rhodobacter sp.
  REGION 1..401: note = tr|A0A421BUF8|A0A421BUF8_9RHOB Isochorismate synthase OS=Rhodobacter sp. BO-81 OX=2294033; GN = DYS74_04900 PE=4 SV=1
MTLPSPASHADAGALPGPNQPFAFRNAAGRVCAMGPAHALARGTRDSLAERLAPFFAGPADGAVIGGALPFDTTRPDCLWQARGGDGTWPGDGAASTEPPSRPVPPRPQPPARGYIDSVARALEIMRREDGLPEALTKIVLARTLLVEEAQAFPLRQVLARLSEDPSVTAFQVSLPSRADQGAPRHLVGATPELLLEKRGAAILSHPLAGSARRLEDAQADAQAAQNLARSEKDQREHRLVVEYILDLLAPDCAELSTPEGTTLTTTRSMWHIGTRIEGRLKDPDTPAVVLAARLHPTPAVCGLPCARAAGLIRSLEPVERDFYAGAVGWCDRRGDGAWHVAIRCAELCGAQARLYAGAGIVLGSEPRAEAAETGAKFGALLAALGLPRDAALHDLDSLHD

SEQ ID NO: 94734 - protein, 371 aa, unidentified
  source 1..371: note = Rhodobacteraceae bacterium
  REGION 1..371: note = tr|A0A418SFP8|A0A418SFP8_9RHOB Isochorismate synthase EntC OS=Rhodobacteraceae bacterium Lw-13e; OX = 1537215 GN=entC PE=4 SV=1
MTFFPASFPSASSGLTAGSAALPYRIGSRHGIAHKWSRGSVAALAARIGESYVAALPFARSGTGMLLTGLSPATAEAAPATAPRLLTHQEVPAAADYAAAVAEAVRRLKADPAFRKVVLARGLDLTFERAPDPQALLAELSRDPVALPFLLPIHDPSREAAKQLIGASPELLLEKTGTAVRSHPLAGSARRTGHAAEDHAAAARLTDSGKDRGEHALVVEYISDTLAPLCRDFTPPGPPEVFTTDSMLHLGTPIRATLRDADHTAFDLAVRLHPTPAVGGTPMEQAERTIADLEAAPRDFFAGAIGWGDSTGDGAWHIAIRCAELLGTRARLFAGAGIVEGSDPAAETAETGAKFGTMLRALGCAALRDQL

SEQ ID NO: 94735 - protein, 381 aa, unidentified
  source 1..381: note = Rhodococcus agglutinans
  REGION 1..381: note = tr|A0A438BED9|A0A438BED9_9NOCA Isochorismate synthase OS=Rhodococcus agglutinans OX=1644129; GN = EGT67_11270 PE=4 SV=1
MDGFLLSRPDRTLRTTGARDRFDSATAATAALAAGRTELIVGALPFDPAAPAALTAPETVSWAPGPWRPATPNPAPLPRVRIESEIPSAAEHVERVRGLLERLGRGELDKVVAARAVRLVADGPISPEALAAHMVVRHEAANGFAVDLTAAGAGYVGHTLVGASPEILLSRRGTTVTCRPLAGSAPRHTDPAADRAEGDRLLASAKNLAEHAFVVDWIRDVLSPLCTDLDVPSTPQLTRTGELWHLASPIRGELRDASLGSLDLATRVHPTPAVCGTPTDRALDTIREIEGDRRFYGGAVGWCDAAGDGDWVVAIRCAEIDADGTTALAWAGGGIVAASDPVAELDETTTKLGTLLGALGVDSPAADTAGDTLTRISRTHE

SEQ ID NO: 94736 - protein, 360 aa, Rhodococcus coprophilus
  REGION 1..360: note = tr|A0A2X4U7S3|A0A2X4U7S3_9NOCA Isochorismate synthase OS=Rhodococcus coprophilus OX=38310 GN=dhbC_2; PE = 4 SV=1
MDGFLLSRADRTVHATGTRRLFDDVASASRALHRGDADLVVGALPFDPTRPVALAQPDHTEITDGPWEAPDDLPDLPEVQRTQEIPLPRVHVARVRALVERLELGEFDKVVAARKVALAAETPIDPLTLAARMVARHPDAATFAVDLSAAGERFWGHTLVGASPELLVSRRGNTVTCRPLAGTAARREDPDDDLRAGKDLLESEKNLAEHRYVVEWIRARLAPLCDELTIPETPELTSTPDVWHLATPITGRLRDAETDALTLATALHPTPAVAGTPTEAAMDAIARVEGDRRFYGGAVGWCNSDGDGDWFVAIRCAELSSDCRRAIAWGGGGIVADSDPHAELDETTAKLRTLLGALGV

SEQ ID NO: 94737 - protein, 362 aa, Rhodococcus erythropolis
  REGION 1..362: note = tr|C0ZRS3|C0ZRS3_RHOE4 Isochorismate synthase; OS = Rhodococcus erythropolis (strain PR4 / NBRC 100887); OX = 234621 GN=RER_11150 PE=4 SV=1
MDGFVLSRPDHSVVTRGVRRSFDSSDAATHALSAGTTKLIVGALPFDPAAATALYEPAEATITSRPWQPCDPQALPTTRVDREIPSSSEHLRRVEKLIGRLRSGEIDKVVAARTVELRTQTPISPTALAARMAALNPVANTFAVDLSAAGAEFEGHSLVGATPEVLVSRRGRVVTCRPLAGTTKRSADADQDREAGESLLHSTKNLAEHAFVTAWIREVLQPMCSDLSVPVTPELTNTHEVWHLASPIRGTLRNDTTALDLAIALHPTPALCGTPTDAALKVIRETEEPRRFYGGAVGWCDEAGDGDWVVAIRCAEISADGRNAWASAGGGIVAESDPQDELDETSTKLRTLLTALGAETLD

SEQ ID NO: 94738 - protein, 357 aa, Rhodococcus fascians
  REGION 1..357: note = tr|A0A161GMM3|A0A161GMM3_RHOFA Putative isochorismate synthase MenF OS=Rhodococcus fascians D188; OX = 1051973 GN=menF PE=4 SV=1
MKLRFVLSRQDHHVVGLGVQQQFPDVADAVAAVQQGRNVVGVLPFDMSDATALIEPAEFYRRAGAWAVPDAQPPLPSVTVVRQIPEPGVHVERVREVVRRVKAGVAEKIVLARAIELAAESPIDPSAVLSALVTRDPMGNGFFADLSPADEPGRHLVGASPELLVRKRGNVVSCHPFAGTAARSTDPDEDARISAALAASAKDQAEHRFVVDEIKAALAPFCETLDVPATPQLSSTPQLWHLSTPIVGTLADPSTSALDLALALHPTAAVAGVPRAAAMRAITEIEGSRGFYAGALGWTDGSGDGEWMVAIRCIELTADGLSGTATAGGGIVADSDPDAELDETTAKFRTVLSVFEN

SEQ ID NO: 94739 - protein, 380 aa, Rhodococcus gordoniae
  REGION 1..380: note = tr|A0A379M3F9|A0A379M3F9_9NOCA Isochorismate synthase OS=Rhodococcus gordoniae OX=223392 GN=dhbC_2 PE=4; SV = 1
MQVPVLGATATDRAERPVAHPFVLSRPHGTVVAEGVSERFDHPSAAAEALRTGRITALVGALPFEVGRPAALTAPHLLHHSPAPYAAPAGDLPPIAITGALPSEGEHIDRVTTALRLLRSDESELLKVVLARALVLRAGRPVGPHELLAALVRNDPLHNGFLVDLAAAGDPWTGRHLVGSSPEVLVCRRGDRVTAHPLAGSAPRHRDPEIDRATAETLAGSAKNLAEHAHVIDAIRTALEPLCADLDIPDRPMVTSTRQLWHLGTPVEGRLRDPDVTALDLALAVHPTPAICGTPTAAARDLILATEGDRGFYAGAVGWCDGRGDGEWMVTIRCAVLEPDGVGLTAYAGGGIVADSDPADELAETTVKFGTVLDALGVLR

SEQ ID NO: 94740 - protein, 379 aa, unidentified
  source 1..379: note = Rhodococcus hoagii
  REGION 1..379: note = tr|E9SWY0|E9SWY0_RHOHA Isochorismate synthase; OS = Rhodococcus hoagii ATCC 33707 OX=525370; GN = HMPREF0724_10630 PE=4 SV=1
MDGFLLSRSDRTLRTAGTRDRYDTVAAAAAALADGRVELVVGALPFDPSAPTALTAPATAAWTDEPWRPDTVAPLPRVTIAGEVPSPAEHVARVRRLVDRLRGGEFDKVVAARAVRLTADAPIDPEALAARMIRRHETANGFAVDLTASGEGYRGHTLVGASPEILLGRRGDVVTCRPLAGSAPRRADPDADQAEGAELLASAKNLAEHAYVVEWIREVLAPLCAELDVPASPELTRTGELWHLASPIRGRLLDGSVSSLELARRLHPTPAVCGTPTDRALDAIRDVEGDRRFYGGAVGWCDGVGDGDWVVAIRCAEIDADGTSALAWAGGGIVAASDPDTELAETTTKLGTLLGALGVDAHAAAPAGDTLTRTSRTHE

SEQ ID NO: 94741 - protein, 363 aa, Rhodococcus jostii
  REGION 1..363: note = tr|Q0S661|Q0S661_RHOJR Isochorismate synthase; OS = Rhodococcus jostii (strain RHA1) OX=101510; GN = RHA1_ro05194 PE=4 SV=1
MDGFLLSRADRTLRTSGARHGYDTAAAAVAALSNGDTELIVGALPFDPQRPAALTAPESWEFTDGPWRPGAVPDLPSVRLTREIPDPTEHVARVRSLVDRLREGALGKVVAARSVTLRADTPISAEALAARMIHQNPTANGFAVDLSAAGEGFRSHSLVGASPEVLLSRRGRRVTCRPLAGTAPRRADPEADEKEGRGLLESTKNLAEHAFVTAWIRDVLAPLCTELTVPDSPVLTSTHEVWHLATPIEGVLRDASTSALSLATRLHPTPAVCGTPTDLALATIRDVEEDRRFYGGAVGWCDGDGDGDWVVAIRCAEIAADGLEALATAGGGIVAESDPESELDETTTKLRTLLRALGVQQGP

SEQ ID NO: 94742 - protein, 363 aa, Rhodococcus opacus
  REGION 1..363: note = tr|A0A1B1K0N4|A0A1B1K0N4_RHOOP Putative isochorismate synthase OS=Rhodococcus opacus OX=37919; GN = menF2 PE=4 SV=1
MDGFILSRADRTLRTSGARHGHDTAAAAVAALANGDTELIVGALPFDPERPAALTAPESWEFTDGPWRPGTVPDLPSVHLTREVPDPAEHVARVRSLVDRLREGTLGKVVAARSVTLRADTPISAEALAARMIHQNPTANGFAVDLSAAGESFRGRSLVGASPEVLLSRRGRRVTCRPLAGTAPRRTDPEADEKEGRGLLESTKNLAEHAFVTAWIREVLAPLCTELTIPDSPVLTSTHEVWHLATPIEGVLRDPSTSALSLATALHPTPAVCGTPTDLALATIRDVEEDRRFYGGAVGWCGGDGDGDWVVAIRCAEIAADGLEALATAGGGIVAESDPESELDETTTKLRTLLRALGVQQSP

SEQ ID NO: 94743 - protein, 362 aa, Rhodococcus qingshengii
  REGION 1..362: note = tr|A0A4S5EFW1|A0A4S5EFW1_9NOCA Isochorismate synthase OS=Rhodococcus qingshengii OX=334542; GN = EU244_16160 PE=4 SV=1
MDGFVLSRPDHSVVTRGVRRSFDSSDAATHALSAGTTKLIVGALPFDPAAATALYEPAEATIASRPWQPRDPQALPTTRVDREIPSSSEHLRRVEKLIGRLRSGEIDKVVAARTVELRTQTPISPTALAARMAALNPVANTFAVDLSAAGAEFAGHSLVGATPEVLVSRRGRVVTCRPLAGTTKRSADADQDREAGESLLHSTKNLAEHAFVTSWIREVLQPMCSDLSVPATPELTNTHEVWHLASPIRGTLRNDTTALDLAIALHPTPALCGTPTDAALKVIRETEEPRRFYGGAVGWCDEAGDGDWVVAIRCAEISADGRNTWASAGGGIVAESDPQDELDETSTKLRTLLTALGAETLD

SEQ ID NO: 94744 - protein, 360 aa, Rhodococcus rhodochrous
  REGION 1..360: note = tr|A0A385L8B2|A0A385L8B2_RHORH Isochorismate synthase OS=Rhodococcus rhodochrous OX=1829; GN = C6369_005520 PE=4 SV=1
MDGFLLSRAERSVHATGTRRFFDDVHSATQALRSGKATIVVGALPFSPHRPVALAQPEDVEITDGPWQAPSDLSELPPVRISTELPLPRVHVERVRRLVEQLSLGEMEKVVAARRVALEADEPLDPLALAARMIERHPDAATYALDLSAAGERYWGHTLVGATPELLVSRRGDTVTCRPLAGTAARRADPDEDRRAGEELLTSDKNLTEHGYVVDWIRTRLAPLCSDLDIPDKPELTATPDVWHLATPITGTLRDAGTDALTLAHVLHPTPAVAGTPTEAALDAIARVEGDRRFYGGAVGWCDEQGDGDWFVAIRCAELSSDGRRAVAWAGGGIVADSDPVAELDETTAKLRTLLGALGV

SEQ ID NO: 94745 - protein, 396 aa, Rhodococcus ruber
  REGION 1..396: note = tr|A0A098BSU7|A0A098BSU7_9NOCA Putative isochorismate synthase OS=Rhodococcus ruber OX=1830; GN = menF PE=4 SV=1
MQAPVAARGTAASRQVDTAASRQVDTAASRQVTAAAPFVLSRPHGTVVADGVDVRFDSADEAAAALRAGSVAAVVGALPFAPDHRAALTAPVALRHEPDPLGDGAVPLAPVRIAATMPAEDEHLDRVATALRQLRDPADDLAKVVLARALLLRADAPVDPMSLLARLAGNDPAGNGFAVDLTAAGGAWTGRHLVGASPEVLVRRRGDLVTCHPLAGSAPRHPDPEVDGRTAQRLAASEKNLAEHAHVVEALRASLDPLCSDLDIPRTPTLTSTRQLWHLGTPIAGRLRDRSVTALDLALVVHPTPAICGTPTAAARALIRELEGDRGFYAGAVGWADRDGDGEWMVTIRCAVLDADGTTLTTHAGGGIVAGSDPLDELAETTTKFGTVLDALEVRR

SEQ ID NO: 94746 - protein, 378 aa, Rhodococcus sp.
  REGION 1..378: note = tr|A0A0K2Y9G2|A0A0K2Y9G2_9NOCA Putative isochorismate synthase OS=Rhodococcus sp. RD6.2 OX=260936; GN = menF PE=4 SV=1
MTTGTATNAATPHEPSGPAEPHFILSRPHGTVTARGVTHAITDPAHAVARLRAGAPIVGALPFDVREPAALTVPGRLDVTTTPLPVPSRPAVPTVTVRRHVPSPAEHTRRVADTVTRLRETSLRKVVLARALELDAAEPLDHRAILDRLVAADPSGNGYSVDLGPAGDDHRGVRLVGSSPEVLIRRQGTTVTCHPLAGSAPRDPDPDRDAALGRALAASTKDLTEHAYVIESLTQSLAPLCTDIVVPDGPVLTTTPQLWHLGTPLRATLRDPAVTALELALAVHPTPAVCGTPTDEAMRTILELEGSRGFYAGAVGWSDASGDGEWMVTLRGAQIAADGLHVVAHAGGGIVAASDPETELDETTTKFGTIMAALGVTA

SEQ ID NO: 94747 - protein, 463 aa, unidentified
  source 1..463: note = Rhodocyclaceae bacterium
  REGION 1..463: note = tr|A0A5C7JXR0|A0A5C7JXR0_9RHOO Isochorismate synthase OS=Rhodocyclaceae bacterium OX=1898103; GN = E6R10_10190 PE=4 SV=1
MKTPTAPSGLLALNEAQWRDIGCRLDRLAANAPSGALLTVTLPLGHGDTCNAGHDWLDRQPKAAEVCYWSQADSGSHRLGLGRAVVCTSAGPARFTALQAAFNGIAQQWLHDAGGTDFQPFACIGFAFDDDSADVLPNAQLGVAAVVLDNQHGALRASFTTPAREAATAVARWQALLTAEPGEPQRPVVGHLADPTLAQRAWQLRVDAALQAIADGKVRKLVLSRSRRLSLADDRVGAALLRRLLSQHRESTVFAMGTAKGFFCGATPERLLAFRDGEVQTDALAGTAWGEAELAIDKNLREQQLVVEAIRASLLPLCRTLDVPPAPTVMHLRELQHLHTPISGHTHAGVGLFDLLARLHPTPAVGGWPTAPAREWLRHHDERRPGWYGGGFGWIDRAGNGEIAVALRCGLITPGRIELSAGAGIVAGSTAAHEFDETEAKLGTMLAALRDADAGTQQTGTRG

SEQ ID NO: 94748 - protein, 453 aa, unidentified
  source 1..453: note = Rhodocyclales bacterium
  REGION 1..453: note = tr|A0A3L6LYD6|A0A3L6LYD6_9RHOO Isochorismate synthase OS=Rhodocyclales bacterium GT-UBC OX=2316108; GN = D3M94_18515 PE=4 SV=1
MIERLRQRLLAPDLLRRLAHLADAAPASAPLSLSLDLGPGEENWLHLLPDQHACWYRARPKDKEYRLGIGHLLQVESCGGQRFAALDHAWSSLCRYWRHELAARPLTFAGFAFDEQGGSPLPNALLALPAILFESIDGHCRVTLNTLAGERERAIGNWLQWLAVPPTAGPRHNCGFSRPDPARDGPLADQAWMARVKAALRDIDAGRVDKLVLSRRRLLASSAHCTVREVLTGLLQQQAGSLIYAFGNGQQFFLGATPERLLWKNGCTVRADALAGTAWPGSPGLRAGKNHHEQSLVVRAVVEALAPLCATAPEVEAQSEQAAGRLRHLRNEICARLNPGTSVWDLVAALHPTPAIGGYPRPAALDWLRRHDEYRGAWYSGGFGLLEGNGDGEFSVALRSALFDAPYIELQAGAGIVAGSQATDELAETEAKLGTLLAALQPLTAARQQRQAG

SEQ ID NO: 94749 - protein, 482 aa, unidentified
  source 1..482: note = Rhodohalobacter sp.
  REGION 1..482: note = tr|A0A371QHP2|A0A371QHP2_9BACT Isochorismate synthase MenF OS=Rhodohalobacter sp. SW132 OX=2293433; GN = menF PE=3 SV=1
MISAERFPKTTTEFIETLDSESFKAFLHALSQEKKNPDRLISITLPIAPIDPLVALEQHSSEEDKFYWDHPVNKISISAAGKVSELRATGQNRFDEISEKTNKLKKRISAYTSVTHNMAGPLFLGGYSFGDHNVGKIWKRFGAARFVLPEWILVKSGHRHMLTLILERKSKAIHDIYMEIIERVTDFLNISGRHALPAPAINGNQNILCNMQSAFDKPTWLDRVDRAKDLIHEKAFEKIVLARSVKLKSKHNLNPTLLSYHLREKYPECYNFIIQIDKETSFIGATPERLASFEDGTFKTEGLAGSTSRGKSASEDAALAQSLLDSHKDRIEHQFVVRAIDNSLAPYSYRVEHPNKPQIKKLNNVQHLFTPISATIKSGVKIHDLVQQLHPTPAVGGFPRENAVPFIQEIEQIERGWYAAPVGWYNLNGCGEFAVAIRSALLHKNNAHLFAGCGIVGDSDPESEWQETLMKFQPITTALNEL

SEQ ID NO: 94750 - protein, 409 aa, unidentified
  source 1..409: note = Rhodoluna lacicola
  REGION 1..409: note = tr|A0A060JL99|A0A060JL99_9MICO Isochorismate synthase OS=Rhodoluna lacicola OX=529884 GN=Rhola_00002120; PE = 4 SV=1
MTAGQKLTLTTRELHTDDFKLLSHLPETPLAFIRGGDGIVGWGEAVRLESNLSAGRVADLAAQWRTLVAAAEVTDEVQLPGTGLVAFGTFAFSDLSKAASTLIVPQVILGSRDGRVWLTTVSGAAAPDFWTHSAEYKANASINFETGEISAEKFKELVSSAVEKINSGTLAKVVLARDVIAKLPEKFDVRSVLQKLAHQYPTCWVYSVDGMFGASPELLVRVSHAQVSARVLAGTAGRGTDPGVDQAIAVALAASSKNTAEHAFAVDSLVKSLAPFCTHVDADPTPFSLALPNVWHLASDVHGVLREDASVLDVAAALHPTAAVAGTPTDVAQNLIAKLEGSDRGRYAGPVGWIGADGDGEWAIGLRGAQITDKTIRAFAGCGIVAESEPEAELAETDLKFRPIREALA

SEQ ID NO: 94751 - protein, 472 aa, unidentified
  source 1..472: note = Rhodothermaceae bacterium
  REGION 1..472: note = tr|A0A1V0DD43|A0A1V0DD43_9BACT Isochorismate synthase MenF OS=Rhodothermaceae bacterium RA OX=1779382; GN = menF PE=3 SV=1
MPHPSFTGTPAAAEDLVQARQALARAVRRVLGHRNGATEQAPRVRQVQVPLPPLDPFRWLQAQTLFPRVYWSGRHDAEARCGVGAAHLLAADADADVDALQRLLAPVLAGSEAPVRYLGGLRFDAARPTAPRWRPFGTYRFVLPRFELHGAGEDARLVCNLLLPFDYERADAILAELDALVLEEGPPRGSLSLPTARDDRPGLEGWRDNIRWALHAFASSTLEKVVLARRALFHLEAPIDPYLLLSNLQPATPNCFHFCFQFEPGAAFLGASPERLFHRAGRQIRSEAVAGTRPRGASDLDDARLRDELLRSEKDQREHAYVRDSIERALAPLCEHLHVDARASVMRLARGRHLVSGVHGTLHPGATDFEVLRRLHPTPAVGGYPTAPALEAIRTLEPFDRGWYAGPVGWIGPDAAEFAVAIRSGLVEGARLALYSGAGIVRGSTPEAEWDEIEHKISDFINVLGLDLRRAK

SEQ ID NO: 94752 - protein, 509 aa, unidentified
  source 1..509: note = Rhodothermaeota bacterium
  REGION 1..509: note = tr|A0A368D352|A0A368D352_9BACT Isochorismate synthase OS=Rhodothermaeota bacterium MED-G64 OX=2164156; GN = DBW78_04080 PE=4 SV=1
MSAPLEHIHMRKTTTSHNSLEKSSAFEYAQTHRAPSSPEWTVFTVDWDVESLLKQLQIRSAGQSNARFVWKAPDSNTSKGEEFVALGRYQALKATGERRFHDLAQAERSLLGKTHFIDLRSNRQPSVPFIVGGAAFHQFNIDPTWSAFGSSQFILPRLLVGTDSNGQGYLRFILPSEEATTWLGHGQSTHSSHSHVFLLEKLEDVLKSEGVDTNKSSTLPYFHLDPVSLAHRLQTAASQHKKAWIARFQRAIEVIQQNPIAKVVLARQAAVHGVTMEQRANLQESLKQRYQNCIHFCVEPTSAAGFFGATPERLLRLQGRHLRIDALAGSRSRGTTTHEDQTLAHDLLHAEKDAMEHDIVKRQILEVLEPISKQLRYPSAPLLKTLPNVQHLHTPIEAELEHSPSVFELIEQLHPTPAVGGYPKHDALGVIEQIEPQNRGWYAGIVGWVSEQGDADMAVSIRSASHMKDALTLYAGCGLVEGSIPEQEWEETYVKLAPFFEAAQDVAHA

SEQ ID NO: 94753 - protein, 466 aa, Rhodothermus marinus
  REGION 1..466: note = tr|G2SEN8|G2SEN8_RHOMG Isochorismate synthase MenF; OS = Rhodothermus marinus (strain SG0.5JP17-172) OX=762570; GN = menF PE=3 SV=1
MRRTDPSAVEGALPVCAPEELPRVLGGRIRRALRQPTAEIVQLRCPVASLDLLTWLAAQPEPVKFYWADRENAEAVAALGAVLLHEITHPLTREALASVEDRLRRADPGVRFYGGGRFDSRASVAPHWEPFGAGRFWLPRFELRREANRYWLICNLVPELDRERVETIVEALRALRWPEVPLTPELPLPLDRRDTPDQAGWARNVARALDAFRRGRMEKVVLARQVQYTFGEVLDGLALLERLQEATPGCFHFYYQPEPGTAFLGASPERLFRRADGHVWSEAVAGTRPRGRTEADDARLAAELLQSEKDRREQYYVQQSIVEELRPLCEALDADAKLSEMTLARGRHLYTGIRGRLRPAVPTGALLEALHPTPAVGGYPRAAAMEAIRAWEPFDRGWYTGPIGWLGADAAEFAVAIRCGLVAGRHLYLYSGAGIVEGSVPALEWDEIEHKISDFVNVLGLELRRS

SEQ ID NO: 94754 - protein, 455 aa, Rhodothermus profundi
  REGION 1..455: note = tr|A0A1M6Q7Q4|A0A1M6Q7Q4_9BACT Isochorismate synthase MenF OS=Rhodothermus profundi OX=633813 GN=menF; PE = 3 SV=1
MPACAPAELPRRLGSRIRRALQQTGTNRIVQLRCPIAPVDLLSWLAAQSMAFKFYWADREGNEAVAAVGAVLQCEVNRALTRESLRFLETYLQQADPGVRFYGGGRFDGQAPVAPHWQPFGMGRFWLPRFELRREGSRYWLVCNLVPELDRTAEAAIKEALAALQWPEVAMDARLPLPVDRCDMPDQAGWTRNVTQALAAFQQGHMVKVVLARQVQYVFNEALDGLALLHRLEEATPGCFHFYYQPQPGTAFLGASPERLFRRADGHVWSEAVAGTRPRGQTEADDARLAAELLQSEKDRREQYYVQQSIIEELRPLCETLEADAQLSEMTLARGRHLYTGIRGRLRPGVSTGALLEALHPTPAVGGYPRPAAVEAIRAWEPFDRGWYTGPIGWLGVEAAEFAVAIRCGLAAGHHLYLYSGAGIVEGSVPELEWEEIEHKISDFVNVLGLELRRS

SEQ ID NO: 94755 - protein, 81 aa, unidentified
  source 1..81: note = Richelia intracellularis
  REGION 1..81: note = tr|M1X578|M1X578_9NOST Menaquinone-specific isochorismate synthase OS=Richelia intracellularis HH01; OX = 1165094 GN=RINTHH_9910 PE=4 SV=1
MLSIKKNCQENNSTKIASIYLEIDLVDPLVLFSRILKVNQLNFYWENKANQESIVAIDAVINKELSGVERFISAEKFIKNV

SEQ ID NO: 94756 - protein, 556 aa, Ricinus communis
  REGION 1..556: note = tr|B9R951|B9R951_RICCO Isochorismate synthase, putative OS=Ricinus communis OX=3988 GN=RCOM_1513750 PE=4; SV = 1
MATAAVAKHCLARFMDLESAKCSLSGQPISTKQSLHLFHNRYQSCSVSMNGCQSDPRVPIGTIETKTFPALPSPAMAMETLNFAISDIKANPPLLTSGIIRLQVPIKQQIEAIQWLHAQHDLLPRCFFSGRSRRKDDTDLFLDFNGGNGSVHNLVSVAGVGSAVLFTHIHPFSYNDWKSIKRFLSAKCPLVRAYGAIRFDAMANISSEWESFGSFYFIVPQVEFDELEGSSMLAATIAWDNALSWTWEQAIDALQLTMSQISSTAVKLCKEFSRTFILNINHFPSKTYWDLAVKRALQIINRRSSPLTKVVLARSSRVVTANDIDPITWLACLQVEGENAYQFCLQPPNSPAFIGNTPEQLLHRKWLGVSSEALAGTRARGGSKALDLQIELDLLSSPKDHLEFAIVRDSIRRKLEAMCSRVVIEPNKAIRKFSRVQHLYAQLSGTLRSEDDEFDILSSLHPTPAVCGFPTEEARLLIAETEVFDRGMYAGPVGWFGGGESEFAVGIRSALVEKGFGALIYAGTGIVEGSNPSLEWAELELKTSQFAGQFSKLLIT

SEQ ID NO: 94757 - protein, 473 aa, Rivularia sp.
  REGION 1..473: note = tr|K9R5E5|K9R5E5_9CYAN Isochorismate synthase family protein OS=Rivularia sp. PCC 7116 OX=373994; GN = Riv7116_0059 PE=4 SV=1
MTVSPCSAEFFVYNKELYQFLVKKRAYCIKNNCTQIASIGLEIDSVDPLVVFQKLSASNKLNFYWENPSKEEAIAAIDAVTKFHIEGKERFIQAEKFIKYNLGKIINFCNVNHSFSQPLFFCSFSFFDTNLQENYPFFPATVFLPKWQVTRKEKCCILRANIKIDADLNIEKTLKILWQKITSINLLKYDAVDLDNSQPQFIKNSITKSSKFQRSVLSALEDIRKGTYSKIVLADALNIQSSTPLNLFKSLNNLRQLHPNCCVFSTSNGKGQNFIGASPETLIAIRNQKLNTDALAGSAARGKTPAEDAKKANLLLNSQKERHEHSLVIDFITQKLLSLGLLPQVSTPRLRQLSNIQHLWTPIIAKVPRNVHPLQIVSQLHPTPAVAGVAPEVACQEIRRYESFERGLYAAPLGWIDAEGNCEFVVGIRSALIDTSTKSSLLYAGAGIVPGSDPQKEFAEIQLKLQALLKALT

SEQ ID NO: 94758 - protein, 355 aa, unidentified
  source 1..355: note = Robertkochia marina
  REGION 1..355: note = tr|A0A4S3M2Q5|A0A4S3M2Q5_9FLAO Isochorismate synthase OS=Robertkochia marina OX=1227945 GN=E7Z59_08935; PE = 4 SV=1
MNLQPADKLWEAVAAALKNELPFVVFSPPESTRVTGYFQKDGKLVKANDDHSSGFLFAPFSEDYPVVLIPSDSIVHAEIGDLTPPESTKDQVQDIIGEDNTRKKHITLLSEALRSLKSGKLDKVVLSRKLLIPRSERDIISVFKGLLSRYPTAFRYLWHHPEVGTWVGATPETLVKIEEGMLETMSLAGTQPYRGSMDVSWGPKEKEEQAMVTRSILNRLYPHCLHVQAGDTRTVKAGKLLHLLTPVKAVLTSQELPLEEIVAALHPTPAVCGLPRKKAKKFILEHEGYDRKYYTGYLGPLSKQGSAELYVNLRCMEITDEAFSIYVGGGITKDSDPDAEWEETVNKSKTMLAVL

SEQ ID NO: 94759 - protein, 431 aa, unidentified
  source 1..431: note = Rodentibacter genomosp.
  REGION 1..431: note = tr|A0A1V3JAZ9|A0A1V3JAZ9_9PAST Isochorismate synthase MenF OS=Rodentibacter genomosp. 2 OX=1908266; GN = menF PE=3 SV=1
MDSLVQATSQLSRQIEDYLRQKQNDIVCFQMDITNVNLLAWLKAQSIYPQFYLHFRDENKSLAAIGQVRSFSQLNLAQTFIEEYNFPIIGGLQFQGSGQFILPQLLLEENGNSTTISCFVEGETSAQNALTILKTLPKTTALCVLTKQPPLHTEQRANKRTWCDWVNQALYEIKQGGLIKLVLANETVFHLKQAINPYDFLAESQNQNQGCYHFLWAEKPYSTFVGSTPERLFAREYNLFLTEALAGTAPITADPKENQQQAEWLLNDEKNLNENWLVVQDISQNIHPMVESFDISEVELKPLRKVQHLLRKIRANLTAHYQDSALLSAIHPTAAVSGLPQQQAKMILSEIETFERGWYAGTLGLMSKAYSEFCVAIRSAFIEGNQIRIFAGAGIVEGSEPLTEWQEIERKAEGLVSLFAEKNNNGEKECL

SEQ ID NO: 94760 - protein, 430 aa, unidentified
  source 1..430: note = Rodentibacter heidelbergensis
  REGION 1..430: note = tr|A0A1V3I6G1|A0A1V3I6G1_9PAST Isochorismate synthase MenF OS=Rodentibacter heidelbergensis OX=1908258; GN = menF PE=3 SV=1
MGSLEQAASQLSLQIEQYLQQGKKDIERFQVNIANINLLAWLKSQTTYPQFYLHFRDENKSMAALGEVRKFTSLNLAQEFIEASHFPLVGGLQFQGSGQFILPQLLLETEKQNTIISCFVEGETSAQRALAQLKTLPKMTALCPLPKQIPLHTEQQANQPMWCDWVNQALYEIKQGELTKLVLANETVFHLKQPVNPYNFLAESEKQNQGCYHFLWAENPHSTFIGSTPERLFAREYNLFLTEALAGTAPITADLKENQQQAQWLLNDEKNLNENWLVVQDISQNIQAMVESFDVSEVELKPLRKVQHLLRKIRANLSAHYRDSALLKAIHPTAAVSGLPQQQARMILSEIETFDRGWYAGTLGVMSEAYSEFCVAIRSAFIERNRIRVFAGAGIVEGSEPLAEWQEIERKASGLISLFAENNDGEKECL

SEQ ID NO: 94761 - protein, 430 aa, unidentified
  source 1..430: note = Rodentibacter heylii
  REGION 1..430: note = tr|A0A1V3KHV8|A0A1V3KHV8_9PAST Isochorismate synthase MenF OS=Rodentibacter heylii OX=1906744 GN=menF; PE = 3 SV=1
MDSLEQATSQLSRQIEDYLRQKQSDIVCFQTDITNVNLLAWLKAQSIYPQFYLHFRDENKSLAAVGQVRSFSQLNLAQTFIEEYNFPIIGGLQFQGSGQFILPQLLLEENGNGTTISCFVEGKTSAQNALTILKTLPKTTALCVLTKQPPLHTEQRANKRIWCDWVNQALYEIKQGGLIKLVLANETVFHLKQAINPYDFLAESQNQNQGCYHFLWAEKPYSTFVGSTPERLFAREYNLFLTEALAGTAPITADPKENQQQAEWLLNDEKNLNENWLVVQDISQNIHPMVESFDISEVELKPLRKVQHLLRKIRANLTAHYRDSVLLQAIHPTAAVSGLPQQQAKMILSEIETFERGWYAGTLGLMSKAYSEFCVAIRSAFIEGNQIRVFAGAGIVEGSEPLTEWQEIERKAEGLISLFAENNNGEKECL

SEQ ID NO: 94762 - protein, 430 aa, unidentified
  source 1..430: note = Rodentibacter mrazii
  REGION 1..430: note = tr|A0A1V3ID93|A0A1V3ID93_9PAST Isochorismate synthase MenF OS=Rodentibacter mrazii OX=1908257 GN=menF; PE = 3 SV=1
MGSLEQAASQLSLQIEDYLRQEKNDIACFRMTITNVNLLAWLKARRTYPQFYLHFRDENKSLAAVGQVRLFSQLNLAQAFIEEYNFPIIGGLQFQGNGQFILPLLLLEENENTTTISCFVEDKTSAQTALEQLKTLPKTTALCVLPKQIPLYTEQRANKQMWCDWVNQALYEIKQGELTKLVLANETVFHLEQAINPYDFLAESEHQNQGCYHFLWAEDPHSTFVGSTPERLFAREHNLFLTEALAGTAPITTDPKENQQQAEWLLNDEKNLNENWLVVQDISQNIHSMVESFDVSEVELKPLRKVQHLLRKIRANLTAHYRDSALLQLIHPTAAVSGLPQQQARMILSEIETFDRGWYAGTLGLMSEVYAEFCVAIRSAFIEGNRIRVFAGAGIVEGSEPLSEWKEIERKASGLISLFAENNNGEKECL

SEQ ID NO: 94763 - protein, 431 aa, unidentified
  source 1..431: note = Rodentibacter myodis
  REGION 1..431: note = tr|A0A1V3JK02|A0A1V3JK02_9PAST Isochorismate synthase MenF OS=Rodentibacter myodis OX=1907939 GN=menF; PE = 3 SV=1
MSSLEQAASQISRQIENYLRQQQTDLVRFQMEIANVNLLAWLKAQTTYPKFYLHLRDENNQFAAMGEVRSFSQLNLAQEFIEQYDFPLVGGLQFQGYEQFVLPQILLEQKNNAITMLSVFVEGEASAQSALSLIKTLAKTTALCSLPKQIPLLTEQRANQQTWEDWVKQALFEIKQGELTKVVLANETTFHLRQAINPYDFLAESEKQNHGCYHFLWAENPYSTFVGSTPERLFAREYNLFLTEALAGTAPMTGDQQENRQQADWLLKDEKNLNENWLVVQDISQNIKSMVETFDVSEVELKPLRKVQHLLRKIRANLTAHYRDSALLKAIHPTAAVSGLPQQEARMILSEIETFERGWYAGTLGIMSEAYSEFCVAIRSAFIEGNRIRVFAGAGIVEGSQPFIEWKEIERKAAGLISLFAENNKGEKECL

SEQ ID NO: 94764 - protein, 293 aa, unidentified
  source 1..293: note = Rodentibacter pneumotropicus
  REGION 1..293: note = tr|A0A4S2Q4Y2|A0A4S2Q4Y2_9PAST Isochorismate synthase (Fragment) OS=Rodentibacter pneumotropicus OX=758; GN = D3M76_11015 PE=4 SV=1
KTTALCALPKQIPLHTEQRANKQTWCDWVNQALYEIKQGELTKLVLANETVFYLKQAINPYDFLAESERQNHGCYHFLWAENPHSTFMGSTPERLFAREYNLFLTEALAGTAPITADPEENQQQAEWLLNDEKNLNENWLVVQDISQNIHSMVESFDVSEVELKPLRKVQHLLRKIRANLTAHYRDSTLLKAIHPTAAVSGLPQQQARIILSEIETFDRGWYAGTLGLMSEAYTEFCVAIRSAFIEGNRIRVFAGAGIVEGSEPLAEWKEIERKASGLISLFAENNYGEKECL

SEQ ID NO: 94765 - protein, 430 aa, unidentified
  source 1..430: note = Rodentibacter rarus
  REGION 1..430: note = tr|A0A1V3IE22|A0A1V3IE22_9PAST Isochorismate synthase MenF OS=Rodentibacter rarus OX=1908260 GN=menF; PE = 3 SV=1
MGSLEQAASQLSLQIEQYLQQGKTDIERFQVKIANVNLLAWLKSQTTYPQFYLHFRDENKSVATLGEVRSFSALNLAQEFIETYHFPLFGGLQFQGYGQFILPQLLLETDEQNTAISCFVEGKTSAQSALEQLKTLPKMTALYPLPKQIPLHTEQQANQPMWCDWVNQALYEIKQGELTKLVLANETIFHLKQPVNPYDFLTESEKQNQGCYHFLWAENPHSTFVGSTPERLFAREYNLFLTEALAGTAPITADLKENQQQAQWLLNDEKNLNENWLVVQDISQNIQAMVESFDVSEVELKPLRKVQHLLRKIRANLTAHYRDSALLKAIHPTAAVSGLPQQQARMILSEIETFDRGWYAGTLGVMSEAYSEFCVAIRSAFIERNRIRVFAGAGIVEGSEPLAEWQEIERKASGLISLFAENNDGEKECL

SEQ ID NO: 94766 - protein, 430 aa, unidentified
  source 1..430: note = Rodentibacter ratti
  REGION 1..430: note = tr|A0A1V3KXH5|A0A1V3KXH5_9PAST Isochorismate synthase MenF OS=Rodentibacter ratti OX=1906745 GN=menF; PE = 3 SV=1
MGSLEQAASQLSQQIEDYLRQEQNDIACFQMEIANINLLAWLKAQRTYPQFYLHFRDENKSLATVGQVRSFSQLHSAQTFIEEHHFPLVGGLQFQGNGQFILPLLLLEENENMTTISCFVEGKTAAQTALEQLKTLPKTTALCALPKQIPLYTEQQANKQMWCNWVNRALYEIKQGELTKLVLANETVFHLKQAVNPYDFLAESERQNQGCYHFLWAENPHSTFVGSTPERLFAREYNLFLTEALAGTAPITTDPKENQQQAEWLLNDEKNLNENWLVVQDISQNIHPMVESFDVSDVELKPLRKVQHLLRKIRANLTAHYRDSALLQSIHPTAAVSGLPQQQARMILSEIETFDRGWYAGTLGLMSEAYTEFCVAIRSAFIEGNRIRVFAGAGIVEGSEPLAEWKEIERKASGLISLFAENNNGEKECL

SEQ ID NO: 94767 - protein, 431 aa, unidentified
  source 1..431: note = Rodentibacter sp.
  REGION 1..431: note = tr|A0A1V3JX47|A0A1V3JX47_9PAST Isochorismate synthase MenF OS=Rodentibacter sp. Ppn85 OX=1908525; GN = menF PE=3 SV=1
MDSLEQATSQLSRQIEDYLRQKQNDIACFRTDITNIDLLAWLKAQSTYPQFYLHFRDENKSLAAIGQVRSFSQLNLAQTFIEEYNFPLIGGLQFQGNGQFILPQLLLQENEDSTTINCFVEGKTSAQNALTILKTLPKTTALCVLTKQSPLHTEQRANKRIWCDWVNQALYEIKQGGLTKLVLANETVFHLKQAINPYDFLAESQNQNQGCYHFLWAEKPYSTFVGSTPERLFAREYNLFLTEALAGTAPITNNRQENQQQAEWLLSDEKNLNENWLVVQDISQNLNPMVESFDVGEVELKPLRKVQHLLRKIRANLTAHYQDSALLSAIHPTAAVSGLPQQQARMILSEIETFERGWYAGTLGLMSEAYSEFCVAIRSAFIEGNRIRVFAGAGIVEGSEPLTEWQEIERKAAGLISLFAEKNNNGEKECL

SEQ ID NO: 94768 - protein, 430 aa, unidentified
  source 1..430: note = Rodentibacter trehalosifermentans
  REGION 1..430: note = tr|A0A1V3IUP7|A0A1V3IUP7_9PAST Isochorismate synthase MenF OS=Rodentibacter trehalosifermentans; OX = 1908263 GN=menF PE=3 SV=1
MGSLEQAASQLSLQIEQYLQQGKKDIERFQVNIANVSLLAWLKSQSAYPQFYLHFRDENKSIAALGAVRKFSSLNLAQEFIEHFHFPLLGGLQFQGCGQFILPQLLLETNEQHTTISCFVEGKASAQSTLAQLKTLPKMTALCPLPKQIPLYTEQGANKQMWCDWVNQALYEIKQGELTKLVLANERVFHLKQPVNPYDLLAESEKHNQGCYHFLWAENPRSTFVGSTPERLFAREYNLFLTEALAGTAPMTADLKENQQQAEWLLNDEKNLNENWLVVQDISQNIKPMVESFDVSEVELKPLRKVQHLLRKIRANLSAHYRDAELLKAIHPTAAVSGLPQQQARMILSEIETFDRGWYAGTLGVMSEVYSEFCVAIRSAFIEGNRIRVFAGAGIVEGSEPLAEWQEIERKASGLISLFAENNDGEKECL

SEQ ID NO: 94769 - protein, 606 aa, Rosa chinensis
  REGION 1..606: note = tr|A0A2P6P2G1|A0A2P6P2G1_ROSCH Putative isochorismate synthase OS=Rosa chinensis OX=74649; GN = RchiOBHm_Chr7g0180661 PE=4 SV=1
MLSQKVSLSFYKSLAYHIFPSPIGSSLFVSPMAAGSAAAVGRRCLACFMDPESAKCSSTISSSSSSSRQTIHFPNHRNSHQRFCSLSMNGCQGDHPHLPLGTVETRSFPAVPSPSLAVETLSSALSQLKANPPAYTSGIIRLQVPIQQKIEAIDWLYAQNKLLPRCYFSDRAQTGNPKRSIDCANGNGNGNGQSPKKHNKLVSVAGVGSAVFFQDLHPFSYRHWKSLKRFLSTDCPLIRAYGAIRFDARATISSEWEAFGYFYFMVPQVEFDELEDSSILATTIAWDNSLSWTLGNAIDELKATMYQISSIVLKLQKQVCSMLMLSNSHIPSKKYWDLAVNRALQKIRSDSALIKVVLARSSRVITATDIDPIAWLACLQVEGKNAYQFCLQPPDAPTFIGNTPEQLFHRTWLDINSEALAGTRARGKSLSEDLQIELDLLSSPKDHLEFTIVRESIRKKLENVCNSVVVEPKKEIRKLPRVQHLYAKLSGRLRSEDDEFEILSSLHPSPAVCGFPTEEARVLIAETEVFDRGMYAGPVGWFGGGESEFAVGIRSALVEKGLGALIYAGTGVVEGSNASSEWDELELKISQFTKLLKLEVPLEIKN

SEQ ID NO: 94770 - protein, 486 aa, Roseiflexus castenholzii
  REGION 1..486: note = tr|A7NRP7|A7NRP7_ROSCS Isochorismate synthase; OS = Roseiflexus castenholzii (strain DSM 13941 / HLO8); OX = 383372 GN=Rcas_4216 PE=4 SV=1
MTKPFQQHYGRLISLSMPCPGVSPADLLRHARGQPRSFWESARDGVAFAGMGIAVELMAWGANRFVEIEQQARALFENAVMLDEREPLAAPRLFGGFAFHNDFVPDLAWADFPPAHFVLPHYQLVRVRDSFWLTLNVHAPPGEDPRALAPDLREALLAQVDALQSEPPPLPPRSSARLAYPMPFEQWARSVERIVRQINVGELKKVVLARIAEASFDAPVDVDSALACLAQRYPDTYRFLFEPRPGRAFFGATPELLAQVNGDRVTTMALAGSIRRGATPDEDERLALALLDSAKDRHEHQIVVDEVRNRLASLTRRLDVGATDVMRLSNIQHLHTPISGVLREPRGILPIIATLHPTPALGGEPRAAAMRLIAELEPAPRGWYAAPVGWIDRRLDGQFGVAIRSAVVQATRAWLYAGAGIVAASDPQREWDETNLKFRPMLEGLGHTDRHGLGHLVGTRIATDTTDRHGLGHTDRHGYDGSPQIK

SEQ ID NO: 94771 - protein, 395 aa, Roseomonas gilardii
  REGION 1..395: note = tr|A0A379N6N5|A0A379N6N5_9PROT Isochorismate synthase dhbC OS=Roseomonas gilardii subsp. rosea; OX = 243956 GN=dhbC PE=4 SV=1
MGDGSIPAEGVASPAASAGQAMGFAFLSGRRRLQGEGMAGLLPRGPVATLGERVREFFRAHPQAGLLAGALPFDRDALDHLTAPERVTEPAGSGASGPTASAASPAPRWSLRPEPTALAYATAVSRALEAMAVEPGLAKLVLSRCLVATAERAIDPEALLRRLDTDPAITAFLVPLPPAGDGTGRLLAGATPELLVSRQGRAVLSHPLAGSARREADPAADRAAAEALGRSGKDRREHALVAEFILDMLAPHCRKLGAPEGTTITSTRSMWHLGTRIEGELKDPGTSAADLAALLHPTPAVCGVPRDRAAERIHALEGYERDFYAGAVGWCDRAGDGSWHVSIRCAEIAGNRARLYAGAGIVPGSDPQAEARETAAKFRAMLNALGVPPGQEFDR

SEQ ID NO: 94772 - protein, 391 aa, Roseomonas mucosa
  REGION 1..391: note = tr|A0A379MZW4|A0A379MZW4_9PROT Isochorismate synthase dhbC OS=Roseomonas mucosa OX=207340 GN=dhbC PE=4; SV = 1
MGDGSIPAEGGASPSAASAGRATGFAFLSGRRRLRGDGMAGLLPRGPAATLGERVRGFFRAQPEAPLLAGALPFDRAAPDYLTAPRRVAEPAGAAAPPDAVAPRWSLRPEPSAAVYAASVSRALEAMAAEPALAKLVLSRRLLATADRDIDPEALLRRLDTDPAVTAFLVPLPPAGGGTPRLLAGATPELLVARRGRAVLSHPLAGSARREADPAADRAAAEALGRSGKDRREHALVAEFILDMLGPHCRNLAAPEGTTVTATRSMWHLGTRIEGELKDPDTSAADLAALLHPTPAVCGVPRDRAAERIQALEGHDRDFYAGAVGWCDRDGDGAWHVSIRCAQIAGNRARLYAGAGIVPGSDPEAEARETAAKFRAMLNALGVPPGQEFDA

SEQ ID NO: 94773 - protein, 155 aa, Roseomonas sp.
  REGION 1..155: note = tr|A0A1Q2YYX4|A0A1Q2YYX4_9PROT Isochorismate synthase DhbC OS=Roseomonas sp. TAS13 OX=1926319 GN=dhbC; PE = 4 SV=1
MAEFILDMLGPHCRNLAAPEGTTVTATRSMWHLGTRIEGELKDPDTSAADLAALLHPTPAVCGVPRDRAAERIQALEGHDRDFYAGAVGWCDRDGDGAWHVSIRCAEIAGNRARLYAGAGIVPGSDPEAEARETAAKFRAMLNALGVPPGQEFDA

SEQ ID NO: 94774 - protein, 206 aa, Rothia dentocariosa
  REGION 1..206: note = tr|A0A448UWV9|A0A448UWV9_9MICC Isochorismate synthase entC OS=Rothia dentocariosa OX=2047 GN=entC PE=4; SV = 1
MPERLQIDDIPVPEHEVTLAEPTQIEGRENPGYRQAVATAVERMKAHQLDKVVLSRLLRADYAPGTLDLAGVYNNLRAQQPNTFIFSVKLPQGHRGLEYPYLMGASPELIFSTEPDTGEGSAFKTHPLAGSAPRIAEHGSAEDEALGQRLMASRKDRGEHATVIADIRAQLEPMTRQLTIPEVPSLLQTPQLWHLGTPSRVCLSRV

SEQ ID NO: 94775 - protein, 379 aa, unidentified
  source 1..379: note = Rothia kristinae
  REGION 1..379: note = tr|A0A147E8I4|A0A147E8I4_9MICC Isochorismate synthase dhbC OS=Rothia kristinae OX=37923 GN=dhbC PE=4; SV = 1
MSPTLPAFCMSTPWGRVRGEDPLTGLPEAQALAAAAEHGTAVAGLLPFHPVQEPLLLVPRRWERTPAQDSRPGDPEPTAQAAALPAPRAVHGLDSPAFREVVAAAVARLHDGQLEKIVLSRLLRLDYDAAAPLDPAAVHRNLLAQHPRAYVFACRDPRAGEGQEAETPWHLGASPELVMSVRDGVCTTHPLAGSASRAGARDATEDVQIGEQLMRSPKDRGEHATVIQDIARRLDPLCEELDVPAAPSLLATPQLWHLGTRITGRLKPGVTALDAARAIHPTPAICGSPRDIALRMIEELEPHRRGFFGGLVGWCGPDGDGEWALNLRSARVGARRAVLFAGAGIVEGSTPDGEHAETGTKLSTFLAALGLDARARPVR

SEQ ID NO: 94776 - protein, 367 aa, Rothia mucilaginosa
  REGION 1..367: note = tr|A0A525I508|A0A525I508_9MICC Isochorismate synthase OS=Rothia mucilaginosa OX=43675 GN=DI608_00895; PE = 4 SV=1
MTNLPDFIFATGTRVLRASGAMTPVTFDNALDEAKRAGSAVVGLIPFDPDMPAYLFVPERLEEQQVPVPEQTVALAEPVSVTGRQNDRFRAAVATAVERMKAGELSKIVLSRVLTARYAPGALNLEALYNNLRAQQRSAFNFAVRLPEGERGMSGSYLMGASPELVFRTEGRAFKTHPLAGSAPRIAEPGSAEDEAIRDRLFASPKDRHEHAYVINDIAKRLAPIAEELNVPQVPSLLQTPQLWHLATPIDGVLKEGLTCLDGARAIHPTPAICGAPTEKALELIRQLESFERRYFGGLVGYMDAEGNGEWALVLRCAQVSPDEAVLYAGAGIVAESDPELEHTETGTKLGSFGRALGVDTLGEDTP

SEQ ID NO: 94777 - protein, 362 aa, Rothia nasimurium
  REGION 1..362: note = tr|A0A4Y9F190|A0A4Y9F190_9MICC Isochorismate synthase OS=Rothia nasimurium OX=85336 GN=E4U03_10075 PE=4; SV = 1
MPQLPALPSPFMLAEGTTVVRAEGALTPVAEADALSLAQCRGSAVVGLIPFDPATPAQLAVPDRWVREDIPLPTDDTVEQPAPALVEGIDSDVYRAAVAHAVELMNRGQLDKVVLARLLRVQYEQELNLPHLFDTLRAQQQRATVFSAQLPNGNYLMGASPELVFQTEGSAFRTVPLAGSAARTAAPGSTDDAQIGEALMRSAKDRAEHATVVNDIRQRLEALTLQMDVPAAPSLISTPQLWHLSTPVTGQLLPGVSSLQAARAIHPTPAICGTPTDLARDLVEELEPFDRGFFGGLMGYMDAYGQGSWYLVLRCAEVAPQEATLFAGAGIVKDSTPANEHAETATKLGTFARALGLNLGSL

SEQ ID NO: 94778 - protein, 375 aa, Rothia sp.
  REGION 1..375: note = tr|A0A433EB16|A0A433EB16_9MICC Isochorismate synthase OS=Rothia sp. HSID18069 OX=2419515 GN=D8M41_08555; PE = 4 SV=1
MSTTLPDFMFATGTRVMRTAGSLRQVTLQQAHATAVEAGTAVVGLIPFDPDAPAHLFVPEHLQIDDIPVPEHEVTLAEPTRVQGRENPGYRQAVATAVERMKAHQLDKIVLSRLLRADYAPGALDLTGVYNNLRAQQPNTFVFSVKLPQGHRGLEHPYLMGASPELVFSTEPDTGEGSAFKTHPLAGSAPRIAERGSTEDEAIGRRLMASPKDRGEHATVIASIRAQLEPITRQLTIPEEPSLLQTPQLWHLGTPISGVLKQGMTCLDGAHAIHPTPAICGAPTEVARRMITELEPFSRDYFGGLVGYMNADGSGQWALVLRCAEVDTQTAILYAGAGIVAKSDPVLEHTETGTKLGSFGRALGINTLPEAPPAA

SEQ ID NO: 94779 - protein, 480 aa, unidentified
  source 1..480: note = Rubidibacter lacunae
  REGION 1..480: note = tr|U5DHU6|U5DHU6_9CHRO Isochorismate synthase; OS = Rubidibacter lacunae KORDI 51-2 OX=582515; GN = KR51_00034710 PE=4 SV=1
MHAVPSSVRSSSPLDLPFDLHPGSEQRAVLMAARERARRRGCPQVVVLRSELPPVDPLAVLQAAYRSDRLYGYWERRDRHHAIAAFGAAASATFATVRRFVQVREFVERWRARLLASEEASTPKFFCSFAFAAAPPASVPPPLFPAATVFLPHHQLERCGERVELTTHLVLSPQNDLDALWANYCRDLRAIACIRSEVVPTPILPAQWLQHRESRPERFTAGVSGALEAIAAEQLEKVVLARSLEVVAPLPLNPFASLDFLRRQHPDCFAFAVGNGRNAHFIGASPERLLSARDRHLVSDALAGSAPRGATPAEDARLAAALLASDKEQREHALVREFICLRLRQLGLSPQMGPLQLMQLANIQHLWTPVRALADTGHSIFDILSHLHPTPAVAGLPRARACDYIQSSEAGDRSLYAGPLGWADGNGNAEFVVGIRSAEVVGARARLCAGAGIVAGSDPQAELAEVQLKWQAMLRALGRT

SEQ ID NO: 94780 - protein, 427 aa, Rubrivivax gelatinosus
  REGION 1..427: note = tr|I0HLY1|I0HLY1_RUBGI Isochorismate synthase MenF; OS = Rubrivivax gelatinosus (strain NBRC 100245 / IL144); OX = 983917 GN=menF PE=4 SV=1
MNLALPPGHPLRLCSAALEIAPLPPERLLAVQGEPTAAFMAPNGESWVGIGAVRWLTGRPGDGHALWAGVADVSPDAPPPTALGVLPFSPHEAPDELWAGLLPGGVVLPERLVVQRGGRAWLRLTLPAAEADTLRSRLASVARELAALPPTESQALPDFEEFDDAETAARYTAAVGDAVARIRAGELVKVVLARRARIAFGAVPSAAAVMRRLSAHQSGAVRYAWCRGGKAWLGATPETLLRLDGRTLRTEALAGTRPESRAEELYADAKERHEHAVVVDAVRAAIAPWVQALPPTRAPGLRRTRGLAHLHTPIEATLSAAPDALALVHALHPTPAVCGLPADRAATLLAALEGEARGLYAGPVLRLSADGTAHAVVGLRGALLAGRLAVLPAGAGIVDGSDGERELAETRAKQGSVLDAWRAFVAA

SEQ ID NO: 94781 - protein, 400 aa, Rubrivivax sp.
  REGION 1..400: note = tr|A0A519GF05|A0A519GF05_9BURK Isochorismate synthase OS=Rubrivivax sp. OX=50259 GN=EOP38_01135 PE=4; SV = 1
MATNGQWPLQPPTAESLLRLYREGDSAFVSPACSVLTRGAYAQLDIPALSQLPSRAATLLDEVARDGEVEPLLIGAVAFGERVPPRLIVPEGVIMGAGVKDGSPHGVRASALPGERVAGLNLPSAARYRSNVEEALRCIAAGQFEKVVLSRAMRVQAQVQARRLMQLLLPRNVLGYTFAVDLGVRAGQGATALVGASPELLLSKRGRHVVSHPLAGSVPRAQDPVEDQARAARLLSSLKDQREHTYVVDAVAQALAPHCRKLLVPPKPSLVATATMWHLGTRITGDLDDPEASALALAMALHPTPAVCGHPRRAAQDFIQRVEGFERDYFAGLVGWVNGQGDGEWAVTIRCAEVAEQHATLYAGAGIVMGSDPALELAETEAKMQTMLSAMNVALRKEAA

SEQ ID NO: 94782 - protein, 507 aa, Rubrobacter radiotolerans
  REGION 1..507: note = tr|A0A023X6D1|A0A023X6D1_9ACTN Isochorismate synthase MenF OS=Rubrobacter radiotolerans OX=42256; GN = menF PE=3 SV=1
MIGHGHTASEGFSASSEAAGPVRPVRELAGLVRELLLRPESRGGERRAVRLAVEFSAGAGEVPSLETPLGWLFSLKNRTEAQLFPKVYWSGREAARRGGRESAAVGAAHRADGLQATLLAAADSPETRYYGGLRFDSGYPEERRDARWSGFGDGSFVLPRVELSRDDGLCVLSCNLVLPDDAKYAESLPAFVEGLMAEDPAGPDGAAPRLVARRDRPDFEGWSREVERAVEEFRERPGKVVFARRADLDFDGDLDALSLLGSLKAATPGCFHFYFEPEPGGAAFIGATPERLYGREGRAVRSEAVAGTRPRGASAADDDGLLEELLGSEKDRAEQRYVRDSIERDLRKLCAALTVEEGVSEMKLASRRHLVSRFRGTLAEGVTDADVIRALHPTPAVGGYPKGEAILRLRDSEPFDRGWYAGPVGWLSRDAAELAVGIRSGLVGGSRLSLFSGAGIVAGSTPGGEWAEIEQKISDFILVLGDGESSGAAPAVALPHDAPDSLERATG

SEQ ID NO: 94783 - protein, 466 aa, Rubrobacter xylanophilus
  REGION 1..466: note = tr|A0A510HJK9|A0A510HJK9_9ACTN Isochorismate synthase MenF OS=Rubrobacter xylanophilus OX=49319 GN=menF; PE = 3 SV=1
MLRREARPGNARWRLAGEVSRALSGVRLEEGGAEERVVRLSVPVGEVDPLLWLAAQRPGCRMYWSARGGGFEVAAAGEADVLAGGPGEYPAALRKRQGLLLAGDGGTRYYGGARFDAARESDSGWAPFGAYRFVLPRFELRVREEMRELACNLVLPRDVGRQDEILAWLEALPFPSEEVGPSAFPAPLRRLDTPRLSGWRSGVGRALGAFREGRMGKVVLARRVDFDFEGPLDAPALARALRDVTPGCFHFYLEPEEGVAFLGASPERLYRREGRSVTSEAVAGTRPRGGSEADDRALGGELLGSEKDREEHAYVLRSIREELGSLCESLRVDGDVSEMRLATRRHLVARLRGILHPGVTDADLLEALHPTPAVGGYPREAALAEIRSSEPFDRGWYAGPVGWIGAGGAEFAVGIRSGLVRGSRLALFSGAGIVRGSDPEEEWAEIEQKISDFAGILGLEGRDASG

SEQ ID NO: 94784 - protein, 450 aa, unidentified
  source 1..450: note = Ruminiclostridium cellobioparum
  REGION 1..450: note = tr|S0FN61|S0FN61_RUMCE Salicylate synthase; OS = Ruminiclostridium cellobioparum subsp. termitidis CT1112 OX=1195236 GN=CTER_0841 PE=4 SV=1
MRKYYEKNIPNESRNTVYETAAHLCSGEEDNVYLYENNDCVSVGAGIYSEIIVTAEEIVIKRKSAGQSIKVSDLCRDLDNLFKSLEVDSWRAYGIANFGLARYIYGLDVGTETGELLHLIIPDREYRIDKETILLRALNEDDLKTMEKNISNVFLNGVREENVTFYNGKEVLIFDEEYYKNIVGLAVKEIENKEYQKVILSRKIPVHSRLDMLQTYMHGRHKNTPARSYFYSFPNLEVTGFSPETIAEVDASGTVYTFPLAGTRALTEDSKINKNLKKELLQDPKEIAEHAISVKLADEELEQVCVPGSVAVTEFMSVMERGTVQHLGSRLRGKLRAEYNPWHAFFKLFPAVTASGIPKKEAIEAIGRIEKDARDLYSGGVLTYDSNGTLDAALVLRSIFQNEEETWVRVGAGIVEMSNPERELAETREKISSIAGQLVEEQQRYIQLSV

SEQ ID NO: 94785 - protein, 489 aa, unidentified
  source 1..489: note = Ruminiclostridium hungatei
  REGION 1..489: note = tr|A0A1V4SM11|A0A1V4SM11_RUMHU Isochorismate synthase/isochorismate lyase OS=Ruminiclostridium hungatei; OX = 48256 GN=mbtI PE=4 SV=1
MKERTKVERNFEANKNVAPIPCRDFHGVLCEMGGMEILMKKYYEKYISNRSGMAIYELAGHICGGERDNCYLYENKDVVSVGIGIHKEIIASPEEIVIQGEYAKQSVRVSELRQDIDKVFRSMDVDGWRAYGIANFGLARHIYGMDLGAEAKELLHFVIPDREYRVKKDIILLRALNEEALKSMESNVRSAAERCGKEEPFSYYDGKEVLSFDRDYYMDIVRLAVQEIKDREYQKVILSRKIPVLNRLDMLKTYIHGRSGNTPARSYLYRFSNLEVAGFSPETVAEVDASGTVYTFPLAGTRALTGDSTTDKSLREELLNDPKENAEHAISVKLADEELEQVCVPDSVVVTEFMKVIERGTVQHLGSRLRGKLCEGNNTWHAFFKLFPAVTASGIPKKEAIEAIGRIEKDPRNLYSGSVMTYDWDGTLDAALVLRSVFQNQEGAWVRVGAGIVEMSNPERELAETREKVGCISGQLVKELQQQYVHVSV

SEQ ID NO: 94786 - protein, 421 aa, Ruminococcus sp.
  REGION 1..421: note = tr|A0A3A9DKS1|A0A3A9DKS1_9FIRM Isochorismate synthase (Fragment) OS=Ruminococcus sp. 1xD21-23; OX = 2320089 GN=D7W80_32635 PE=4 SV=1
MTRIYTCNIPIEADLVDAFCALQKGFTDQFVYYDKARPCRYMGLGRCIALPSLREVEWVHGEGAEARAPRGVGDGFGAGSGAAPDGAALEGAAQPPVFFSFNRFDATNSAPADELMASFPRLRFMLPEIVLMENERGRFLQVNSLGPVYPGRVARFQRLVAAAPRRRAEAIPFTLVPDSRAVWDAEMEEALAAIAAGRVSKVVLSRRQRLVAARPFSSKDLLVNLIDGDARGTVLLYRYADVFFCGCTPELLVRKQGDRVESMCLAGTCPAGATDVESEALAAALMADGKNRAEHDYVVRLIRSVLERVCYDVDVPATPQIMRLAHVQHLFTPAAARVLAGVTLADLMEDLHPTPAVAGTPVGEAKMLLRAIEPYNRGFFAGACGFVDGAGDGEFSVALRTGVFDGEVGWVYGGCGIVVGS

SEQ ID NO: 94787 - protein, 462 aa, Rummeliibacillus sp.
  REGION 1..462: note = tr|A0A3N5ZRH5|A0A3N5ZRH5_9BACL Isochorismate synthase OS=Rummeliibacillus sp. TYF005 OX=2058214; GN = CW357_13900 PE=4 SV=1
MNRKLSTTTGDQIETETEKSTLKFFTETIEVNRLSALAFFEAGEESFANQRYYWQNREKTFTLVGLGYAHIITSHSTDQRFDDVEQQWKKLTQHIVTNDKELQPILFGGFTFDPENGVSGEWEGMPPAFFVVATYQLVIRNDHVYISTNYIAEQENPQILNELCKKRDELMHTAQVKALKTYAKPKVKSSFEPFKEEYLESIHQVTSLIRQKEADKVVIARSLALEFEKEVSSPNVLSQIILEQPESYLFGLEHNEKLFFGASPERLVKVENSYAYSSCVAGSVKRGKTAEEDEGLGQSLLNDAKNRSEHQYVVDMIGHTFKENCASYTIPSEPRLLKIRDIQHLYTPVEGHLKNGATILQLVKTLHPTPALGGVPRMKAMEVIRKYEPMNRGLYAAPIGWLDANGNGEFAVAIRSALLHQDKAYLYAGGGIVADSQPQSEYEETLVKFRPMIRALGGQLHE

SEQ ID NO: 94788 - protein, 412 aa, Runella sp.
  REGION 1..412: note = tr|A0A3G3GPD9|A0A3G3GPD9_9BACT Isochorismate synthase OS=Runella sp. SP2 OX=2268026 GN=DTQ70_14565 PE=4; SV = 1
MMSDKLETTGASSLFDHGLHPLSAWQSTRELGFAAALWRLPHQKDKHLIVNFGSELPRTRMTLDELPAGFAMSPFLNIEGDSSLFIEADLYFRFDEHGDVTLEKESAFLSGSNREKWYNHYRNRPTNASPLVAHSVSSRQPELPSFVYLDAVQKAVKAIEAGEFKKVVFSRVKQVELATDFTFSEVFERLCEKYPTAFVSMVYLPQLDQVWLGATPETLVSVDKQGIFRTVSLAGTQSAFDASGAPISVKKAAWTQKEIEEQALVGRYIISCFKKIRVREYLEEGPKTVVAGNLMHLRSDYLVDTKTINFPELGTVMLELLHPTSAVCGMPKMEALAFIQQHEGYDREFYSGYLGPVNVGNETHLFVNLRCMKIQNNVATLYAGGGITEDSEPEKEWQETEMKCQTMLSVLG

SEQ ID NO: 94789 - protein, 389 aa, Saccharomonospora sp.
  REGION 1..389: note = tr|A0A4P7CDZ7|A0A4P7CDZ7_9PSEU Isochorismate synthase DhbC OS=Saccharomonospora sp. 31sw OX=2528243; GN = dhbC PE=4 SV=1
MTERSPVDLLAAYRRGDFFLATENRTMLGRGIYTAVSDADEFALAERVRTLLLGKAEEQSGPDEADLVAVGALPFDSDATTPGHVVVPENVHVAGALHPAAAALPRHEVPRPVAIRPVPEPSRHVEAVATAVTALAERNLRKVVLARALDVEFAGPVGPEGILHNLVVDNDRGYTFAAELPNARTLVGASPELLLSRRGRTVVSHPHAGSAPRSADPTIDRENAESLLASRKDHIEHAVLTEAIVETLRPYCARLDVPPRPALVSTPTMWHLGTTITGELSDPGVTALHLAAALHPTPAICGTPTPSARRLVTELEEFDRGYYAGAVGWVDAQGDGEWAVSIRCAELAEQSLRLYAGGGIVPESDPKAELAETSAKFATLLRAMGLPQE

SEQ ID NO: 94790 - protein, 385 aa, Saccharopolyspora erythraea
  REGION 1..385: note = tr|A4FPU9|A4FPU9_SACEN Isochorismate mutase; OS = Saccharopolyspora erythraea (strain ATCC 11635 / DSM 40517 / JCM 4748 / NBRC 13426 / NCIMB 8594 / NRRL 2338); OX = 405948GN=menF PE=4 SV=1
MSWVRDGDGLVGWGCAARLDTSGTERFVEADAWWQDWAEQVEVHDEVGLPGTGPVAFTSMAFAEEPGRSVLVVPEVLVGQRDGVRWVTTVGEPAAARPPEPVAHPGMVRYSDGQLSATGYRQAVADAVRRMREVGDLDKIVLAHDLLACTSDPLDGRFLLNNLAARYPSCWTFSVDGLVGATPELLLERTGQLVRSRVLAGTIWPREGRGADELAAELLASGKDRSEHDYAASSLATCLSPFCTELTVPEEPSVLRLRNVMHLASDVSGVLSGSQATLLRMTDAVHPTAAVGGTPTPQAVKLIHELEGMDRDRYAGPVGWVDARGNGEFGVALRCAQIQSAPEDREGRVRLFAGCGIVADSDPDLEVAEAEAKLLPMREALEGIA

SEQ ID NO: 94791 - protein, 409 aa, Saccharopolyspora rectivirgula
  REGION 1..409: note = tr|A0A073AW39|A0A073AW39_9PSEU Isochorismate synthase OS=Saccharopolyspora rectivirgula OX=28042; GN = GU90_13755 PE=4 SV=1
MDSDTEDLDVVPDDAALRLLEDYEAGSSFYFSSPRGAVLARGVEAVVPKVRCGKAGLPQKVAEFLAGARGFNRPDPMVVGAVPFGENLPAHLVLPSEVVRAEPLRTTGESVRSVNAPECAVQPVPLPEEYERGVQRVLRRIADGEMSKIVLARSLQLTAQQPIEIQDVLRNLATTDPSGYTFAVDLPRRGEDGIRDPRGPHPEFARTFLGASPELLVSRFGGRVRANPMAGSRPRSTDPVEDQRRAAELSTSDKDLREHAAVVDAVVEQLRPFCSELDVQPRPSVISTAAMWHLATEITGRLKSTDTTSLELAAALHPTPAVCGTPVDQARKVIAEIEPFDRGYYAGMVGWCDASGDGEWVVAIRCAEIEDEVLRLFAGAGIVEGSDPASELAETTAKFRTALSAMGLE

SEQ ID NO: 94792 - protein, 508 aa, Saccharopolyspora sp.
  REGION 1..508: note = tr|A0A4R4Y9J4|A0A4R4Y9J4_9PSEU Isochorismate synthase OS=Saccharopolyspora sp. 7K502 OX=2530387; GN = E1288_33325 PE=4 SV=1
MSRPNTSTPRAARARPRRRGGTATDWSPSVLVSVTESAAFCATASLATVTDCRHPVDGHAHAFGAAHLLESDAYPPGVATTPRLLTARTRRLEAGDPRYDSPLLELLPTDAVLSWVRDGSGLVGWGCAARLDVAGPDRFNRADDWWRELCHQFEVDDSVGLPGCGPVAFASLAFADDPGHSVLIVPEVVIGQRDGVRWITTIGDGSTEQQPVEPVHPPGTVSYSDGQLSATGYRQAVAEAVHRMRQTGDLDKIVLAHDLLASTSEPLDARFLLNNLAARYPTCWTFAVDGLVGATPELLLEREGYEVRSQVLAGTVWPREGHTTEQLAAELMASAKNRSEHAYAAESLAVRLRPFCSDLTVQNEPEVLRLRNVLHLATNVEGKLSESGTRNGATLLRMVAAVHPTAAVGGTPTDDAVQAISELEGMDRGRYAGPVGWLDGSGNGEFAVALRCAQVETAAAPGTEAERGGGRIRLFAGCGIVPESDPDQEVAEAEAKLLPVREALEGVR

SEQ ID NO: 94793 - protein, 365 aa, Saccharothrix espanaensis
  REGION 1..365: note = tr|K0JXD9|K0JXD9_SACES Isochorismatase hydrolase; OS = Saccharothrix espanaensis (strain ATCC 51144 / DSM 44229 / JCM 9112 / NBRC 15066 / NRRL 15764) OX=1179773; GN = BN6_ 27000 PE=4 SV=1
MLAAETSSALPGLDTYREGGFFFASPTGVLVAEQAGAAHVAPLEPGEVVVGAVPFRPDVASRLTVPGAVRRGAPLHTVSFPDRPTPGGRWLDQRTDADAYTSGVQRALDLMADGALSKVVLARALDLTSAERIDVRQVLAALAARDPRGYTFATDLGGSTLIGTSPELLIRRTGPAVVSNPLAGSRPRSADPEQDGRNATELLASPKDLREHAFVVGAVADALAPFCRELIVPATPELLPTRTMWHLSTKVTGVLRDESTSALDLASALHPTPAVCGVPADTARNLIGELEPFDRGFYTGLVGWTDERGDGEWIVALRCGEVADRTLRLYAGAGVVPGSTPEAELAETSAKFRTFLGALGLKESA

SEQ ID NO: 94794 - protein, 444 aa, Salarchaeum sp.
  REGION 1..444: note = tr|A0A518SCW3|A0A518SCW3_9EURY Isochorismate synthase OS=Salarchaeum sp. JOR-1 OX=2599399; GN = FQU85_10115 PE=4 SV=1
MGTRRNAQESVPAGGRLVSRTRRLDDTPLAALVRTAERPHAVWTAPDEPALLARGAAAFVTASGTDRFASVREQAATVFASIDRPDAAPRAARPRFVGGFSFHDRHDATGVWDGFPGAGFVLPHVQFTATGDTTYLTVNEYGADATPASVNRTLDTVAADARDATRGELDAPPGVRETERTTDRETWRDQVEQVVERIDSGDLEKAVLAQSLRAELDGAFSLPDAFDRLGDAYPDCFRFAFRANGGRTFFGATPERLVTRHGGRLETGALASTVPRGDTPAEDDALEADLSSSEKYQHEHQLVADSIRAQLDGHARNVVTGDQQVRKLATVQHLFTPISADTDEHVLDLVAALHPTPAVGGLPPDAALDAIREIETFDRGWYAAPVGWFDANGDGTFAVAIRSAVADDRAATLFAGNGIVADSDPDAEWEEVLLKYRPVLDALE

SEQ ID NO: 94795 - protein, 464 aa, Salimicrobium flavidum
  REGION 1..464: note = tr|A0A1N7J3S4|A0A1N7J3S4_9BACI Isochorismate synthase MenF OS=Salimicrobium flavidum OX=570947 GN=menF; PE = 3 SV=1
MLQVKTFHIEDKLRKVHEEAVGKNLSLLMSATEKIEGVDPLSFFDQGKRIDEHRHFWKSAEEDFTLVGIGSAISISKEGQGRFQETDKELSEWRNNVRQWNPYDKKGTGTVALGGFGFRPDSTAEEPWEEFPNSNMTIPEFLLTSDEAGSFLTTNLLIHPDDDIEAVIQKSEEDKRKLCTSYSDEHAPVHLEKIEEVRPEEWKRTIAEATEKLADGTLSKVVLAREVRLTFDSAASITKVLQDLSSMQNSSYVFAFEHKGAYFVGATPERLVKVENDELFSACLAGTTPRGDSEEEDERLGCELLGDHKNRLEHDFVVQMIRGAVETYAQDVDIPETPLLYKLRNLQHLYTPVRASLKEGFSLLDVVKDLHPTPALGGLPQQQAVDYIENHELMNRGWYAGPIGWIDGGRNGEFAVAIRSALIRGNKASLFAGCGVVKDSQPEAEYEETKVKLKPMLAVLGGEE

SEQ ID NO: 94796 - protein, 464 aa, Salimicrobium halophilum
  REGION 1..464: note = tr|A0A1G8VBU2|A0A1G8VBU2_9BACI Isochorismate synthase MenF OS=Salimicrobium halophilum OX=86666 GN=menF; PE = 3 SV=1
MLQVKTFHIEDKIRKVHKEAQRTRQSLLLSVTEKIEGMDPFAFFESGKQIDEHRHFWKSADEDFTLVGISSAVSITKEGEDRFPAMEKDLLGWMNRVRSWNPSDKKGTGAVALGGFGFCEVSVAGEPWETFPNSNMTIPKFLLTNDREGSYLTTNLLLTPEEDVEEISMSVEEEKERLLHPVEEEGVSVRLEEIEEVRPEEWKQTIAEATEDLTKGSLRKVVLAREVRLTFDAPASITKVLQDLSEMQNASYVFCYEHGGAYFVGATPERLVKVEHDELFSACLAGTTLRGDTEDEDDELGDELLQDEKNRVEHDYVVQMIRSAVEQYAEEVDVPEGPSLYKLRNLQHLYTPVKARLKEGYSLLDVVKDLHPTPALGGLPQQEAVEYIKNHEEMNRGWYASPIGWIDGGRNGEFAVAIRSALLHDNKASLFAGCGVVESSDPESEYEETMVKFKPMLAVLGGKE

SEQ ID NO: 94797 - protein, 466 aa, unidentified
  source 1..466: note = Salimicrobium jeotgali
  REGION 1..466: note = tr|K2HBX7|K2HBX7_9BACI Isochorismate synthase MenF; OS = Salimicrobium jeotgali OX=1230341 GN=menF PE=3 SV=1
MLQVKTFQTEDKLRNVHEEARMNDEPLLMSITERIDPLDPFSFFEQGKQVDMHRHFWKSAEEDFTLVGIGSAVRISKEGEGRFQESEQELFDWRKSVRQWNPYNKKGTGTVALGGFGFRPESGGEEPWQEFPNSSMTIPEFLLTNDAEGSFLTTNYLVSPEEDVETIICRMEEDKERLQTSDSSGDTETGVRLEKIEEVRPKEWKQSIADATAELKAGTLSKVVLAREVRLTFDSEASITKVLKDLSDMQNSSYVFAFEHGGSYFVGATPERLVKVEDDELFSACLAGTTKRGSSEEEDETLGLALLNDQKNRLEHDYVVQMIRGAVENYSVNVEIPEAPSLYKLRNLQHLYTPVKAKLKEGYSLLDVVKDLHPTPALGGLPQKEAVTYISLHEVMNRGWYASPVGWIDGGRNGEFAVAIRSALIRGDKASLFAGCGVVEDSKPEEEYEETKVKLKPMLAVLGGEE

SEQ ID NO: 94798 - protein, 466 aa, Salimicrobium salexigens
  REGION 1..466: note = tr|A0A1N7LG82|A0A1N7LG82_9BACI Isochorismate synthase MenF OS=Salimicrobium salexigens OX=908941; GN = menF PE=3 SV=1
MLQVKTFQTEDKLRNVHEEARMNDEPLLMSITERIDPLDPFSFFEQGKQVDMHRHFWKSAEEDFTLVGIGSAVRISKEGEGRFQETEQELFDWRKSVRQWNPYNKKGTGTVALGGFGFRPESGGEEPWQEFPNSSMTIPEFLLTNDAEGSFLTTNYLVSPEEDVETIICRMEEDKERLQTSDSSGDTETGVRLEKIEEVRPKEWKQSIADATAELKAGTLSKVVLAREVRLTFDSEASITKVLKDLSDMQNSSYVFAFEHGGSYFVGATPERLVKVEDDELFSACLAGTTKRGSSEEEDETLGLALLNDQKNRLEHDYVVQMIRGAVENYSVNVEIPEAPSLYKLRNLQHLYTPVKAKLKEGYSLLDVVKDLHPTPALGGLPQKEAVTYISLHEVMNRGWYASPVGWIDGGRNGEFAVAIRSALIRGDKASLFAGCGVVEDSKPEEEYEETKVKLKPMLAVLGGEE

SEQ ID NO: 94799 - protein, 466 aa, Salimicrobium sp.
  REGION 1..466: note = tr|A0A2A3A9X7|A0A2A3A9X7_9BACI Isochorismate synthase MenF OS=Salimicrobium sp. WN024 OX=2029857; GN = menF PE=3 SV=1
MLQVKTFQTEDKLRNVHEEARMNNVPLLMSITEKIDQLDPFSFFEQGKQVDMHRHFWKSADEDFTLVGIGSAVRISKEGEGRFQETEQELFDWRKSVRQWNPYNKKGTGTVALGGFGFRPESGGEEPWQEFPNSSMTIPEFLLTNDAEGSFLTTNYLVSPEEDVETIICRMEEDKERLQTSDSSGDTESGVRLQKIEEVRPEEWKQSIADATAELKAGTLSKVVLAREVRLTFDSEASITKVLKDLSDMQNSSYVFAFEQGGSYFVGATPERLVKVEDDELFSACLAGTTKRGSSEEEDETLGLALLNDQKNRLEHDYVVQMIRSAVEDYSVNVAIPEAPSLYKLRNLQHLYTPVKAKLKEGYSLLDVVKDLHPTPALGGLPQKEAVTYISRHEVMNRGWYASPVGWIDGGRNGEFAVAIRSALIRGDKASLFAGCGVVEDSKPEEEYEETKVKLKPMLAVLGGEE

SEQ ID NO: 94800 - protein, 469 aa, Salinibacillus kushneri
  REGION 1..469: note = tr|A0A1H9Y5V7|A0A1H9Y5V7_9BACI Isochorismate synthase MenF OS=Salinibacillus kushneri OX=237682 GN=menF; PE = 3 SV=1
MIQTKQQRFTESINEAIGQRAHEDTPQLFSYTEKIAGVDQISPIAVFQNTQSFKGSRIFWTSPEDEVTLIGLGSVYSFNGTEDTNSNRFKQVHSNWKKMLNSIYVDNPYKHPGTGPVFMGGFSFNPEESSQLWRNYSNTQMTLPEYLITIDKNEAFLTYHVWLDKELDIEDSSCAFVKMLETIKRETKHAHNPLAIMNQQAINADEWKRTVKKATGTIENNVMEKVVLARELRVSFNRNIPVSYVLENLLEQQKQSYIFAIESEDDCFIGATPERLVKVENRHLLSTCLAGTSPRGKTLKEDERLGKQLLDDDKNRMEHAFVVDMIKQAVEACSVKVQVPESPVLYKLRNLQHLYTPVQGVLKEGHSILEVVRRLHPTPAMGGVPRDKALTFIQQEENLSRGWYSAPIGWMDAMDNGEFAVAIRSGLIQGDEASLFAGCGIVRDSDAEKEFQETEIKFLPMLMALGGLQ

SEQ ID NO: 94801 - protein, 567 aa, Salinibacter ruber
  REGION 1..567: note = tr|D5H8W0|D5H8W0_SALRM Isochorismate synthase MenF; OS = Salinibacter ruber (strain M8) OX=761659 GN=menF PE=3; SV = 1
MAGTCACCSRPSSTRAGWSTCPNSTTPTPASIRWSTSGGRHGPSGSTARPTSQGTVPRPLPSRSATPHGRRREGPPPPAPPLHPRPVFLTHTSMLDLDPTVIRDIEGADDVRAALADRIRDATRSSAARTVRVSVPVPGRMRPIDWVRARSSAEAVYWSGRDEDRTVAACGTADVVSGSTAPVDYQALGRVLDERLDGADSGVRYYGGMRFDAGQPTAPNRPDGRWAPFGTYRFVLPRFELVEADGTLRLVCTLVLPRDAERVDEIVDALGAVALPVPSEHTALPRPHQRQDVPGHGEWTDMVRWALDAIDGGSLDKVVLARRVALSLGAPMDPLLVLSHLEPATPGCYHFAVRPSRGAAFVGASPERLFRRAGRTVVSEAVAGTRPRGETAAEDARLRQELLQSPKERREHAFVRDAIRDDLDRVCREVRIPKKRGELALSRGRHLHARITGTLRPDTGTTDVLEALHPTPAVGGVPTDDAVAAIRAREPFDRGWYAGPVGWVGRDAAEFAVGLRAGLVEEAQMALFSGAGIVEGSAPDREWDEIEQKIGDFAAIMGVSDPRMASR

SEQ ID NO: 94802 - protein, 497 aa, Salinibacter sp.
  REGION 1..497: note = tr|A0A2P6BXQ2|A0A2P6BXQ2_9BACT Isochorismate synthase MenF OS=Salinibacter sp. 10B OX=1923971 GN=menF; PE = 3 SV=1
MPNLDSPFVHDRNADSPSEHLADRIRAACADRSNGAERTVQVQVPVTDNANLLEWLRGRENEEQVFWAPRSPETTSFSPSGNGHSEAKTSASRPAVAATGTADVLTGTRQPMEYDRLQRALNDRFRTAAAPVRYYGGLRFDAPQSRTTENPECPWRPFGTYRFVLPRFELRRAPDGVSLACNLVFPRDAGRAETLIEQARVLSIPTREASPSLPKPLGRTDAPEKEEWTRMVQWALSAISDHALDKVVLARKVALELERTLTPLDVLQHLKAATPGCFHFALSPAGGPAFLGASPERLFRQEGRQVVSEAVAGTGERGDTPSADAALWEELLNSPKERREHAFVQNAIRNVLDRLCSSVEVPDTPSELRLARGRHLHARLSGRLRAEVATTDLLDRLHPTPAVGGVPTDQALTAIRTQEPFDRGWYAGPVGWVGPEAAEFAVAIRSGLAEEEKLTLYSGAGIVEGSVPAREWEEIEQKIGDFAAVMGLGARVKDPSR

SEQ ID NO: 94803 - protein, 415 aa, Salinibacterium sp.
  REGION 1..415: note = tr|A0A5B9G679|A0A5B9G679_9MICO Isochorismate synthase OS=Salinibacterium sp. dk2585 OX=2603292; GN = FVA74_12775 PE=4 SV=1
MPALTVETVAIDNPGPLVSLLDRQQPLLWRRRGFGITGHGVAARFEFSGEQRMTDAAATWRAVADAATITDPLALPGTGLVAFGSFSFSPGSAHASRLVVPAFVVGRAEEHFWLTRITVGPAPVEPLTAAMLPRVEAATSAAHASFADGALSSEGYLGIVRDGIGAIRDGRLSKVVLARDLAARLEAGADLRPTIAALAESYPDCWTFAIDGFIGSSPETLVSVHDGVATARVLAGSAARGTDATSDDEAATTLATSPKDQDEHEFAVQSVLASLRPHSRGVVASEVPFTLRLPNVWHLASDVEGVLDDGSTSLDLIRALHPTAAVAGTPTPDAMALIEELEPFDRGPYAGPVGWVGADGDGEWAIALRSARVDSDGTVTAWAGAGIVADSDPERELLETRMKFKPIVDAFDPVG

SEQ ID NO: 94804 - protein, 454 aa, Salinicoccus sp.
  REGION 1..454: note = tr|A0A558AZS8|A0A558AZS8_9STAP Isochorismate synthase OS=Salinicoccus sp. CT19 OX=2493691; GN = FO441_05760 PE=4 SV=1
MNLEAYQNILDDVRLDSESTYLSLQLPTHGYDLDEQKIFSYFHESQGARYWFRSKDDRYNTIGIEYLESIRRDKYSAKALSVQKSSLYGKIQQVPLEADMQSSLSLFGGTRFDSKDTSDEWNDFAMVDFHLPKWQFDLANKELFYSVRLETVDIASVLTEISRELENISAVTKSTFEAPQINMEKDIFPEEWKALVDQAVDILDDRDFRKVVLARQRLLTFKSQVDPLFLLKRLNDEADTYTIYYEKGKSLFISKSPEKLFDIRSNTLTTNAIAGSSERTGEAAKDEGQKAFLLKDEKNRYEHELVRESIVEDLKPYTDRVEFTAEPDVLENKYIYHLHTPISAELTDETSVFELLDAIHPTPAVGGMPKDRAREYIMQEEHGTRGLYAAPIGIIHEDNESEFVVAIRSMLLHANSATLFAGCGIVKGSSSEKEFEETRVKFTPMLNVLGVETR

SEQ ID NO: 94805 - protein, 162 aa, Salinisphaera shabanensis
  REGION 1..162: note = tr|F7Q4C8|F7Q4C8_9GAMM Menaquinone-specific isochorismate synthase protein OS=Salinisphaera shabanensis E1L3A OX=1033802 GN=SSPSH_003737 PE=4 SV=1
MSGTANPAQSSGPARDAATDIQRWQTLLESIPYARHLGLEIVPDSTGVQVHLPFREALVGNVMLPALHGGVLGALIEITARIAAQGEDAMECRPRILDCNVDYLRSARTQSTFASAEIVRRGRRVVLVRVTCWQDRITAPVASARVQLLLDTVSAANPKEAR

SEQ ID NO: 94806 - protein, 407 aa, unidentified
  source 1..407: note = Salinivibrio kushneri
  REGION 1..407: note = tr|A0A4P8H6X3|A0A4P8H6X3_9GAMM Isochorismate synthase OS=Salinivibrio kushneri OX=1908198; GN = FCN78_09390 PE=4 SV=1
MAFTWPGDLSPVAWLDAQPVYPKTYWQSRDGREEVLVLGAGRQFSQLSAAQASLLPDQRIWGCVAFDDAPGYGDFFLPVVELIRRDQQWHLSVNLTEACDSQALLNQIIWQGRPLAAQHAVVREETHTPSRAQWCQSVRCALTHMEQTALQKVVLARQTRLSLNAPISAGQLLQHSQQHNVESFHFLFATGPDDAFVGSTPERLYRRRDCRVTTEAVAGTVRRGASFSDDHRLGEWLLRDTKNVHENQLVVDDIFAGLRRHALTITVDPEPHLIVLRHLQHLRRRISAIIGPGVDDAVLLSALQPTAAVAGLPRENARTFLAEQGIARGRYSGAVGYLSQRESQFCVAIRSAQVTENTVDLYAGAGIVPGSDPDAEWEELDNKLTTLRQCLPACTMPEKDAIRLGAC

SEQ ID NO: 94807 - protein, 460 aa, unidentified
  source 1..460: note = Saliterribacillus persicus
  REGION 1..460: note = tr|A0A368XG07|A0A368XG07_9BACI Isochorismate synthase MenF OS=Saliterribacillus persicus OX=930114; GN = menF PE=3 SV=1
MIETKEKHIDGVLKAARSQATRMHAPTFVSVTNEIDTVDPLGFFQAGKNIDGNRVFWSSATENKSFIGVGKAYTLKAKETSYASVRKQWEELLEHAIIDNAYPLTTPKAFGGFTFDEKMTSTNTDWKEFQGSQFLVPAYVLTMEDDHFYLTINCIVDTTTSLEILSKQISEDTKMLARANFIQEPLSTIENRYEEDPKDWMELVKQATRTIKTSTVDKIVLARELLLDFKNTVDITVVLHHLLQAQSNSYVFAFDSMESSFIGATPERLVRVENQSVLSACLAGTAKRGQTDFEDALIGDRLLHDDKNLHEHQFVVDMIREAISAVSTTMEIPDRPVLYPLKNLQHLYTPVKAELKSSYGILDVVEKLHPTPALAGYPREEAMQFIRSYESLDRGWYGAPIGWFDQDFNGEFAVAIRSALINDTKATLFAGCGVVKDSNSLKEYEETNIKFTPMLSALGG

SEQ ID NO: 94808 - protein, 431 aa, unidentified
  source 1..431: note = Salmonella abony
  REGION 1..431: note = tr|A0A5J0DV61|A0A5J0DV61_SALAB Isochorismate synthase MenF OS=Salmonella abony OX=29482 GN=menF PE=4; SV = 1
MHSITTALENLTRQLSQEIPATPGLCVFDAPFPLNDAFDALSWLASQSSFPQFYWQQRNGDEEAAVLGAITVFSSLDLAQRFLRQHAQPDLRIWGLNAFEPKEGYLLLPRLEWRRSGGTATLRLHLHSDVSLRDDARQAKAFLASLVGIKPVPALRLSLTSEQHWPDKDGWVKLIQQATHTIAQEAFDKVVLARATDLQFSRPVNAAAMMASSRRLNLNCYHFFMAFSADTAFLGSSPERLWRRRETALRTEALAGTVANHPDNHKAWQLGEWLMKDDKNQRENMLVVEDICQRLQNCTHSLDVLPPQVLRLRKVQHLRRCIWTALNQADDTLCLHQLQPTAAVAGIPREPARCFIEQHEPFEREWYAGSAGYLSTRQSEFCVTLRSAKVTANVVRLYAGAGIVRGSDPEQEWQEIDNKAAGLRTLLQMDA

SEQ ID NO: 94809 - protein, 431 aa, unidentified
  source 1..431: note = Salmonella agona
  REGION 1..431: note = tr|B5EZI9|B5EZI9_SALA4 Isochorismate synthase MenF; OS = Salmonella agona (strain SL483) OX=454166 GN=menF PE=3; SV = 1
MHSITTALENLTRQLSQEIPATPGLCIFDAPFPLNDAFDALSWLASQSSFPQFYWQQRNGDEEAAVLGAITVFSSLDLAQRFLRQHAQPDLRIWGLNAFEPKEGYLLLPRLEWRRSGGTATLRLHLHSDVSLRDDARQAKAFLASLVGIKPVPALRLSLTSEQHWPDKDGWVKLIQQATHTIAQEAFDKVVLARATDLQFSRPVNAAAMMASSRRLNLNCYHFFMAFSADTAFLGSSPERLWRRRETALRTEALAGTVANHPDNHKAWQLGEWLMKDDKNQRENMLVVEDICQRLQNCTHSLDVLPPQVLRLRKVQHLRRCIWTALNQADDTLCLHQLQPTAAVAGIPREPARCFIEQHEPFEREWYAGSAGYLSTRQSEFCVTLRSAKVTANVVRLYAGAGIVRGSDPEQEWQEIDNKAAGLRTLLQMDA

SEQ ID NO: 94810 - protein, 431 aa, unidentified; identical to SEQ ID NO: 94808
  source 1..431: note = Salmonella anatum
  REGION 1..431: note = tr|A0A2T8MBA2|A0A2T8MBA2_SALAN Isochorismate synthase MenF OS=Salmonella anatum OX=58712 GN=menF PE=3; SV = 1

SEQ ID NO: 94811 - protein, 431 aa, unidentified
  source 1..431: note = Salmonella arizonae
  REGION 1..431: note = tr|A9MJB5|A9MJB5_SALAR Isochorismate synthase MenF; OS = Salmonella arizonae (strain ATCC BAA-731 / CDC346-86 / RSK2980) OX=41514 GN=menF PE=3 SV=1
MHSITTALENLTRQLSQEIPATPGLCVFEAPFPLNDAFDALSWLASQSSFPQFYWQQRNGDEEAAVLGAVTVFSSLDLAQRFLRQHQQPDLRIWGLNAFEPKESYLLLPRLEWRRSGGTATLRLHLHSDVSLRDDARQARAFLASLVGIKPVPALRLSLTGEQHWPDKDGWVKLIQQATHAIAQEAFDKVVLARATDLQFSRPVNAAAMMASSRRLNLNCYHFFMAFSADSAFLGSSPERLWRRRETALRTEALAGTVANHPDNHKAWQLGEWLMKDDKNQRENILVVEDICQRLQHCTHSLDVLPPQVLRLRKVQHLRRCIWTALNQADDTLCLHQLQPTAAVAGIPREPARCFIEQHEPFEREWYAGSAGYLSTRQSEFCVTLRSAKVTANVVRLYAGAGIVRGSDPEQEWQEIDNKAAGLRTLLQMDA

SEQ ID NO: 94812 - protein, 431 aa, unidentified; identical to SEQ ID NO: 94808
  source 1..431: note = Salmonella berta
  REGION 1..431: note = tr|A0A3V6R702|A0A3V6R702_SALBE Isochorismate synthase MenF OS=Salmonella berta OX=28142 GN=menF PE=3; SV = 1

SEQ ID NO: 94813 - protein, 431 aa, Salmonella bongori
  REGION 1..431: note = tr|A0A0K0HC06|A0A0K0HC06_SALBC Isochorismate synthase MenF OS=Salmonella bongori (strain ATCC 43975 / DSM 13772 / NCTC 12419) OX=218493 GN=menF PE=3 SV=1
MHSITTALENLTRQLSQEIPAAPGICVFDAPFPLNDAFDALSWLASQSSFPQFYWQQRNGDEEAAILGAATVFSSLDLAQQFLRQHQQPDLRIWGLNAFEPKEGYLLLPRLEWRRNGGTAVLRLHLYSDISLRDDARQARVFLTSLVAIKPLPALRLSLTDERHWPDKDGWVKLIQQATHTIAQEAFDKVVLARATDLHFSRPVNAGAMMASSRRLNLNCYHFFMAFSSDSAFLGSSPERLWRRRETALRTEALAGTVANHPDNHKAWQLGEWLMKDDKNQRENMLVVEDICQRLQNCTHSLDVLPPQVLRLRKVQHLRRCIWTALNQADDTLCLHQLQPTAAVAGLPREPARCFIEQYEPFEREWYAGSAGYLSTRQSEFCVTLRSAKVTANVVRLYAGAGIVRGSDPEQEWQEIDNKAAGLRTLLQMDA

SEQ ID NO: 94814 - protein, 431 aa, unidentified; identical to SEQ ID NO: 94808
  source 1..431: note = Salmonella choleraesuis
  REGION 1..431: note = tr|Q57M46|Q57M46_SALCH Isochorismate synthase MenF; OS = Salmonella choleraesuis (strain SC-B67) OX=321314; GN = menF PE=3 SV=1

SEQ ID NO: 94815 - protein, 431 aa, unidentified
  source 1..431: note = Salmonella derby
  REGION 1..431: note = tr|A0A4Z9KW55|A0A4Z9KW55_SALDE Isochorismate synthase MenF OS=Salmonella derby OX=28144 GN=menF PE=3; SV = 1
MHSITTALENLTRQLSQEIPATPGLCVFDAPFPLNDAFDALSWLASQSSFPQFYWQQRNGDEEAAVLGAITVFSSLDLAQRFLRQHAQPDLRIWGLNAFEPKEGYLLLPRLEWRRSGGTATLRLHLHSDVSLRDDARQAKAFLASLVGIKPVPALRLSLTSEQHWPDKDGWVKLIQQATHTIAQEAFDKVVLARATDLQFSRPVNAAAMMASSRRLNLNCYHFFMAFSADTAFLGSSPERLWRRRETALRTEALAGTVANHPDNHKAWQLGEWLMKDDKNQRENMLVVEDICQRLQNCTHSLDVLLPQVLRLRKVQHLRRCIWTALNQADDTLCLHQLQPTAAVAGIPREPARYFIEQHEPFEREWYAGSAGYLSTRQSEFCVTLRSAKVTANVVRLYAGAGIVRGSDPEQEWQEIDNKAAGLRTLLQMDA

SEQ ID NO: 94816 - protein, 391 aa, unidentified
  source 1..391: note = Salmonella diarizonae
  REGION 1..391: note = tr|A0A379U2G5|A0A379U2G5_SALDZ Isochorismate synthase EntC OS=Salmonella diarizonae OX=59204 GN=entC; PE = 4 SV=1
MDMPLTEDAQETMATLAPDCFFFMSPYRSFTTSGCFARYTEPAAAGDSPDSPFQQKLRQQFTEAKSQGIANPILVGAIPFDTRQPSSLFIPMECQCFSRQEKQRTARYFTDHQSLTVTARKAIPEQDAFEAMVARAAMLTATPDVDKVVLSRLIDITTDMAVDSGALLERMVAQNPVSYNFHVPLADGGVLLGASPELLLRKEGDRFSSLPLAGSARRQPDDVLDREAGNRLLASQKDRHEHELVTQAMKQILRDRSTELQLPSSPQLITTPTLWHLGTPFEGKANAGENALTLACLLHPTPALSGFPHQVAKKLIAELEPFDRELFGGIVGWCDAEGNGEWVVTIRCAKLHGNQVRLFAGAGIVPASSPVGEWRETGVKLSTMLNVFGLH

SEQ ID NO: 94817 - protein, 391 aa, unidentified
  source 1..391: note = Salmonella dublin
  REGION 1..391: note = tr|A0A3T3IL56|A0A3T3IL56_SALDU Isochorismate synthase EntC OS=Salmonella dublin OX=98360 GN=entC PE=4; SV = 1
MDMSLAEDAQETMATLAPDRFFFMSPYRSFTTSGCFARYTEPAVAGDSPDSPFQQKLRQQFAEAKSQGIANPILVGAIPFDTRQPSSLFIPMAWQSFSRQQKQRTARYFTDHQSLTVTARKAIPEQDAFEAMVARAAMLTATPDVDKVVLSRLVDITTDVAVDSGALLERLVAQNPVSYNFHVPLADGGVLLGASPELLLRKEGERFSSLPLAGSARRQPDDVLDREAGNRLLASQKDRHEHELVTQAMKQILRDRSTELQLPSSPQLITTPTLWHLGTPFEGKANAGENALTLACLLHPTPALSGFPHQVAKKLIAELEPFDRELFGGIVGWCDAEGNGEWVVTIRCAKLHGNQVRLFAGAGIVPASSPVGEWRETGVKLSTMLNVFGLH

SEQ ID NO: 94818 - protein, 431 aa, Salmonella enterica; identical to SEQ ID NO: 94808
  REGION 1..431: note = tr|A0A2T8R2H3|A0A2T8R2H3_SALET Isochorismate synthase MenF OS=Salmonella enterica subsp. enterica serovar 4,12:i:- OX=353569 GN=menF PE=3 SV=1

SEQ ID NO: 94819 - protein, 431 aa, unidentified
  source 1..431: note = Salmonella enteritidis
  REGION 1..431: note = tr|A0A3R0QC79|A0A3R0QC79_SALEN Isochorismate synthase MenF OS=Salmonella enteritidis OX=149539 GN=menF; PE = 3 SV=1
MHSITTALENLTRQLSQEIPATPGLCVFDAPFPLNDAFDALSWLASQSSFPQFYWQQRNGDEEAAVLGAITVFSSLDLAQRFLRQHSQPDLRIWGLNAFEPKEGYLLLPRLEWRRSGGTATLRLHLHSDVSLRDDARQAKAFLASLVGIKPVPALRLSLTGEQHWPDKDGWVKLIQQATHTIAQEAFDKVVLARATDLQFSRPVNAAAMMASSRRLNLNCYHFFMAFSADTAFLGSSPERLWRRRETALRTEALAGTVANHPDNHKAWQLGEWLMKDDKNQRENMLVVEDICQRLQNCTHSLDVLPPQVLRLRKVQHLRRCIWTALNQADDTLCLHQLQPTAAVAGIPREPARCFIEQHEPFEREWYAGSAGYLSTRQSEFCVTLRSAKVTANVVRLYAGAGIVRGSDPEQEWQEIDNKAAGLRTLLQMDA

SEQ ID NO: 94820 - protein, 431 aa, unidentified
  source 1..431: note = Salmonella gallinarum
  REGION 1..431: note = tr|B5RCD5|B5RCD5_SALG2 Isochorismate synthase MenF; OS = Salmonella gallinarum (strain 287/91 / NCTC 13346); OX = 550538 GN=menF PE=3 SV=1
MHSITTALENLTRQLSQEIPATPGLCVFDAPFPLNDAFDALSWLASQSSFPQFYWQQRNGDEEAAVLGAITVFSSLDLAQRFLRQHAQPDLRIWGLNAFEPKEGYLLLPRMEWRCSGGTATLRLHLHSDVSLRDDARQAKAFLASLVGIKPVPALRLSLTSEQHWPDKDGWGKLIQQATHTIAQEAFDKVVLARATDLQFSRPVNAAAMMASSRRLNLNCYHFFMAFSADTAFLGSSPERLWRRRETALRTEALAGTVANHPDNHKAWQLGEWLMKDDKNQRENMLVVEDICQRLQNCTHSLDVLPPQVLRLRKVQHLRRCIWTALNQADDTLCLHQLQPTAAVAGIPREPARCFIEQHEPFEREWYAGSAGYLSTRQSEFCVTLRSAKVTANVVRLYAGAGIVRGSDPEQEWQEIDNKAAGLRTLLQMDA

SEQ ID NO: 94821 - protein, 431 aa, unidentified; identical to SEQ ID NO: 94808
  source 1..431: note = Salmonella hadar
  REGION 1..431: note = tr|A0A3V2W2Y8|A0A3V2W2Y8_SALHA Isochorismate synthase MenF OS=Salmonella hadar OX=149385 GN=menF PE=3; SV = 1

SEQ ID NO: 94822 - protein, 415 aa, unidentified
  source 1..415: note = Salmonella houtenae
  REGION 1..415: note = tr|A0A484VXT4|A0A484VXT4_SALHO Menaquinone-specific isochorismate synthase OS=Salmonella houtenae OX=59205; GN = SBOV23701 PE=4 SV=1
MHSITTALENLTRQLSQEIPATPGLCVFDAPFPLNDAFDALSWLASQSSFPQFYWQQRNGDEEAAVLGAITVFSSLDLAQRFLRQHSQPDLRIWGLNAFEPKEGYLLLPRLEWRRSGGTATLRLHLYSDVSLRDDACQAKAFLASLIGIKPVPALRLSLTGEQHWPDKNGWVKLIQQATHTIAQEAFDKVVLARATDLQFSRPVNAAAMMASSRRLNLNCYHFFMAFSADSAFLGSSPERLWRRRETALRTEALAGTVANHPDNHKAWQLGEWLMKDDKNQRENMLVVEDICQRLQNCTHSLDVLPPQVLRLRKVQHLRRCIWTALNQADDTLCLHQLQPTAAVAGIPREPARCFIEQHEPFEREWYAGSAGYLSTRQSEFCVTLRSAKVTANVVRLYAGAGIVRGPIRNRNGRK

SEQ ID NO: 94823 - protein, 391 aa, unidentified
  source 1..391: note = Salmonella infantis
  REGION 1..391: note = tr|A0A3R0D9X7|A0A3R0D9X7_SALIN Isochorismate synthase EntC OS=Salmonella infantis OX=595 GN=entC PE=4; SV = 1
MDMSLAEDAQETMATLAPDRFFFMSPYRSFTTSGCFARYTEPAVAGDSPDSPFQQKLRQQFAEAKSQGIANPILVGAIPFDTRQPSSLFIPMAWQSFSRQQKQRTARYFTDHQPLTVTARKAIPEQDAFEAMVARAAMLTATPDVDKVVLSRLIDITTDVAVDSGALLERLVAQNPVSYNFHVPLADGGVLLGASPELLLRKEGERFSSLPLAGSARRQPDDVLDREAGNRLLASQKDRHEHELVTQAMKQILRDRSTELQLPSSPQLITTPTLWHLGTPFEGKANAGENALTLACLLHPTPALSGFPHQVAKKLIAELEPFDRELFGGIVGWCDAEGNGEWVVTIRCAKLHGNQVRLFAGAGIVPASSPVGEWRETGVKLSTMLNVFGLH

SEQ ID NO: 94824 - protein, 431 aa, unidentified
  source 1..431: note = Salmonella montevideo
  REGION 1..431: note = tr|A0A3A3KD70|A0A3A3KD70_SALMO Isochorismate synthase MenF OS=Salmonella montevideo OX=115981 GN=menF; PE = 3 SV=1
MHSITTALENLTRQLSQEIPATPGLCVFDAPFPLNDAFDALSWLASQSSFPQFYWQQRNGDEEAAVLGAITVFSSLDLAQRFLRQHAQPDLRIWGLNAFEPKEGYLLLPRLEWRRSGGTATLRLHLHSDVSLRDDARQAKAFLASLVGIKPVPALRLSLTSEQHWPDKDGWVKLIQQATHTIAQEAFDKVVLARATDLQFSRPVNAAAMMASSRRLNLNCYHFFMAFSADTAFLGSSPERLWRRRETALRTEALAGTVANHPDNHKAWQLGEWLMKDDKNQRENMLVVEDICQRLQNCTHSLDVLPPQVLRLRKVQHLRRCIWTALNQADDTLCLHQLQPTAAVAGIPREPARCFIEQHEPFEREWYAGSAGYLSTRQSEFCVTLRSAKVTANVVRLYAGAGIVRGSDPEQEWQEIDNKAAGLRTLLQMDV

SEQ ID NO: 94825 - protein, 391 aa, unidentified
  source 1..391: note = Salmonella muenchen
  REGION 1..391: note = tr|A0A3T3ES68|A0A3T3ES68_SALMU Isochorismate synthase EntC OS=Salmonella muenchen OX=596 GN=entC PE=4; SV = 1
MDMSLAEDAQETMATLAPDRFFFMSPYRSFTTSGCFARYTEPAVAGDSPDSPFQQKLRQQFAEAKSQGIANPILVGAIPFDTRQPSSLFIPMAWQSFSRQQKQRTARYFTDHQSLTVTARKAIPEQDAFEAMVARAAMLTATPDVDKVVLSRLIDITTDVAVDSGALLERLVAQNPVSYNFHVPLADGGVLLGASPELLLRKEGERFSSLPLAGSARRQPDDVLDREAGNRLLASQKDRHEHELVTQAMKQILRDRSTELQLPSSPQLITTPTLWHLGTPFEGKANAGENALTLACLLHPTPALSGFPHQVAKKLIAELEPFDRELFGGIVGWCDAEGNGEWVVTIRCAKLHGNQVRLFAGAGIVPASSPVGEWRETGVKLSTMLNVFGLH

SEQ ID NO: 94826 - protein, 389 aa, unidentified
  source 1..389: note = Salmonella muenster
  REGION 1..389: note = tr|A0A5I7TND3|A0A5I7TND3_SALMS Isochorismate synthase EntC (Fragment) OS=Salmonella muenster OX=82689; GN = entC PE=4 SV=1
MDMSLAEDAQETMATLAPDRFFFMSPYRSFTTSGCFARYTEPAVAGDSPDSPFQQKLRQQFAEAKSQGIANPILVGAIPFDTRQPSSLFIPMAWQSFSRQQKQRTARYFTDHQPLTVTARKAIPEQDAFEAMVARAAMLTATPDVDKVVLSRLIDITTDVAVDSGALLERLVAQNPVSYNFHVPLADGGVLLGASPELLLRKEGERFSSLPLAGSARRQPDDVLDREAGNRLLASQKDRHEHELVTQAMKQILRDRSTELQLPSSPQLITTPTLWHLGTPFEGKVNAGENALTLACLLHPTPALSGFPHQVAKKLIAELEPFDRELFGGIVGWCDAEGNGEWVVTIRCAKLQGNQVRLFAGAGIVPASSPVGEWRETGVKLSTMLNVFG

SEQ ID NO: 94827 - protein, 431 aa, unidentified; identical to SEQ ID NO: 94824
  source 1..431: note = Salmonella newport
  REGION 1..431: note = tr|A0A3T3D2P0|A0A3T3D2P0_SALNE Isochorismate synthase MenF OS=Salmonella newport OX=108619 GN=menF PE=3; SV = 1

SEQ ID NO: 94828 - protein, 431 aa, unidentified; identical to SEQ ID NO: 94808
  source 1..431: note = Salmonella oranienberg
  REGION 1..431: note = tr|A0A3Z0YS27|A0A3Z0YS27_SALON Isochorismate synthase MenF OS=Salmonella oranienberg OX=28147 GN=menF; PE = 3 SV=1

SEQ ID NO: 94829 - protein, 431 aa, unidentified; identical to SEQ ID NO: 94808
  source 1..431: note = Salmonella paratyphi
  REGION 1..431: note = tr|C0Q058|C0Q058_SALPC Isochorismate synthase MenF; OS = Salmonella paratyphi C (strain RKS4594) OX=476213; GN = menF PE=3 SV=1

SEQ ID NO: 94830 - protein, 391 aa, unidentified
  source 1..391: note = Salmonella potsdam
  REGION 1..391: note = tr|A0A5I6RXR0|A0A5I6RXR0_SALPO Isochorismate synthase EntC OS=Salmonella potsdam OX=597 GN=entC PE=4; SV = 1
MDMSLAEDAQETMATLAPDRFFFMSPYRSFTTSGCFARYTEPAVAGDSPDSPFQQKLRQQFAEAKSQGIANPILVGAIPFDTRQPSSLFIPMAWQSFSRQQKQRTARYFTDHQPLTVTARKAIPEQDAFEAMVARAAMLTATPDVDKVVLSRLIDITTDVAVDSGALLERLVAQNPVSYNFHVPLADGGVLLGASPELLLRKEGERFSSLPLAGSARRQPDDVLDREAGNRLLASQKDRHEHELVTQAMKQILRDRSTELQLPSSPQLITTPTLWHLGTPFEGKANAGENALTLACLLHPTPALSGFPHQAAKKLIAELEPFDRELFGGIVGWCDAEGNGEWVVTIRCAKLHGNQVRLFAGAGIVPASSPVGEWRETGVKLSTMLNVFGLH

SEQ ID NO: 94831 - protein, 382 aa, unidentified
  source 1..382: note = Salmonella rubislaw
  REGION 1..382: note = tr|A0A5I6UWM0|A0A5I6UWM0_SALRU Isochorismate synthase EntC (Fragment) OS=Salmonella rubislaw OX=598; GN = entC PE=4 SV=1
MDMSLAEDAQETMATLAPDRFFFMSPYRSFTTSGCFARYTEPAVAGDSPDSPFQQKLRQQFAEAKSQGIANPILVGAIPFDTRQPSSLFIPMAWQSFSRQQKQRTARYFTDHQPLTVTARKAIPEQDAFEAMVARAAMLTATPDVDKVVLSRLIDITTDVAVDSGALLERLVAQNPVSYNFHVPLADGGVLLGASPELLLRKEGERFSSLPLAGSARRQPDDVLDREAGNRLLASQKDRHEHELVTQAMKQILRDRSTELQLPSSPQLITTPTLWHLGTPFEGKANAGENALTLACLLHPTPALSGFPHQVAKKLIAELEPFDRELFGGIVGWCDAEGNGEWVVTIRCAKLQGNQVRLFAGAGIVPASSPVGEWRETGVKLS

SEQ ID NO: 94832 - protein, 391 aa, unidentified
  source 1..391: note = Salmonella schwarzengrund
  REGION 1..391: note = tr|A0A0N1QY29|A0A0N1QY29_SALSV Isochorismate synthase EntC OS=Salmonella schwarzengrund (strain CVM19633) OX=439843 GN=SeSA_A0753 PE=4 SV=1
MDMSLAEDAQETMATLAPDRFFFMSPYRSFTTSGCFARYTEPAVAGDSPDSPFQQKLRQQFAEAKSQGIANPILVGAIPFDTRQPSSLFIPMAWQSFSRQQKQRTARYFTDHQPLTVTARKAIPEQDAFEAMVARAAMLTATPDVDKVVLSRLIDITTDVAVDSGALLERLVAQNPVSYNFHVPLADGGVLLGASPELLLRKEGERFSSLPLAGSARRQPDDVLDREAGNRLLASQKDRHEHELVTQAMKQILRDRSTELQLPSSPQLITTPTLWHLGTPFEGKANAGENALTLACLLHPTPALSGFPHQVAKKLIAELEPFDRELFGGIVGWCDAEGNGEWVVTIRCAKLQGNQVRLFAGAGIVPASSPVGEWRETGVKLSTMLNVFGLH

SEQ ID NO: 94833 - protein, 431 aa, unidentified; identical to SEQ ID NO: 94808
  source 1..431: note = Salmonella senftenberg
  REGION 1..431: note = tr|A0A401ASN8|A0A401ASN8_SALSE Isochorismate synthase MenF OS=Salmonella senftenberg OX=28150 GN=menF; PE = 3 SV=1

SEQ ID NO: 94834 - protein, 185 aa, Salmonella sp.
  REGION 1..185: note = tr|A0A509CUG7|A0A509CUG7_9ENTR Isochorismate synthase EntC OS=Salmonella sp. NCTC 11881 OX=2583579; GN = entC_1 PE=4 SV=1
MTFWIARRETDCWLHKKDRHEHELVTQAMKQILRDRSTELQLPSSPQLITTPTLWHLGTPFEGKANAGENALTLACLLHPTPALSGFPHQVAKKLIAELEPFDRELFGGIVGWCDAEGNGEWVVTIRCAKLHGNQVRLFAGAGIVPASSPVGEWRETGVKLSTMLNVFWTALRNDDAYTFHPLAG

SEQ ID NO: 94835 - protein, 391 aa, unidentified; identical to SEQ ID NO: 94823
  source 1..391: note = Salmonella thompson
  REGION 1..391: note = tr|A0A3V4Q844|A0A3V4Q844_SALTH Isochorismate synthase EntC OS=Salmonella thompson OX=600 GN=entC PE=4; SV = 1

SEQ ID NO: 94836 - protein, 431 aa, unidentified
  source 1..431: note = Salmonella typhi
  REGION 1..431: note = tr|Q8Z532|Q8Z532_SALTI Isochorismate synthase MenF; OS = Salmonella typhi OX=90370 GN=menF PE=3 SV=1
MHSITTALENLTRQLSQEIPATPGLCVFDAPFPLNDAFDALSWLASQSSFPQFYWQQRNGDEEAAVLGAITVFSSLDLAQRFLRQHAQPDLRIWGLNAFEPKEGYLLLPRLEWRRSGGTATLRLHLHSDVSLRDDARLAKAFLASLVGIKPVPALRLSLTSEQHWPDKDGWVKLIQQATHTIAQEAFDKVVLARATDLQFSRPVNAAAMMASSRRLNLNCYHFFMAFSADTAFLGSSPERLWRRRETALRTEALAGTVANHPDNHKAWQLGEWLMKDDKNQRENMLVVEDICQRLQNCTHSLDVLPPQVLRLRKVQHLRRCIWTALNQADDTLCLHQLQPTAAVAGIPREPARCFIEQHEPFEREWYAGSAGYLSTRQSEFCVTLRSAKVTANVVRLYAGAGIVRGSDPEQEWQEIDNKAAGLRTLLQMDA

SEQ ID NO: 94837 - protein, 431 aa, unidentified; identical to SEQ ID NO: 94808
  source 1..431: note = Salmonella typhimurium
  REGION 1..431: note = tr|A0A0H3NNW7|A0A0H3NNW7_SALTS Isochorismate synthase MenF OS=Salmonella typhimurium (strain SL1344); OX = 216597 GN=menF PE=3 SV=1

SEQ ID NO: 94838 - protein, 391 aa, unidentified; identical to SEQ ID NO: 94825
  source 1..391: note = Salmonella virchow
  REGION 1..391: note = tr|A0A5J0U9F4|A0A5J0U9F4_SALVI Isochorismate synthase EntC OS=Salmonella virchow OX=48409 GN=entC PE=4; SV = 1

SEQ ID NO: 94839 - protein, 440 aa, Samsonia erythrinae
  REGION 1..440: note = tr|A0A4R3VTL1|A0A4R3VTL1_9GAMM Isochorismate synthase MenF OS=Samsonia erythrinae OX=160434 GN=menF; PE = 3 SV=1
MEQLSGLLRQMQQDLRAPQPEHAGFKQITHSVTLSEASELLPWLATQPVYPQFYWQHRQDSEEAAVCGKVCGFHHLQDAEAFLLRQSCDRHVRIWGLNAFNPITEQAALPPGYLFLPRVELLRQANTLTLRVNLFSDTSLQQDADEAAAFITLLLPAARQPLLQADVQSVAHHPDRQGWIHLLQRALGDIKAGLMEKVVLARATTLTLAQPLQATTLMAASRAANHHCFHFMLAHDARQAFLGSSPERLYRRRDTELETEALAGTVANAREADKADELADWLMKDVKNQCENMLVVDDICQRLQQSALSLDVMPPEIVRLRKVQHLRRGIHATLRTASDSACLDALQPTAAVAGLPRQDARRFIAAHEPFERGWYAGSAGYLSRQQSEFSVALRSAEIRDHVLTLYAGAGIVADSDPEQEWQELENKAAGLRSLLEGDMA

SEQ ID NO: 94840 - protein, 470 aa, unidentified
  source 1..470: note = Sandaracinaceae bacterium
  REGION 1..470: note = tr|A0A520R853|A0A520R853_9DELT Isochorismate synthase OS=Sandaracinaceae bacterium OX=2510337; GN = EVA89_00340 PE=4 SV=1
MNAPAQTALSPAPFDRKEAERFLMDALGRALEQRTVAVVRFPAPRAPADAMLRALRRDTAIAWRPPEGPELSAHGAAATLTLRGDDRFEDLKRESAALFAELQRVTHPDAPLAAPRLFGGFSFAVGGASQLPWRGFGDGRFFLARWTYERGASPTLTYAADLRDGWAGRLSLARAELGAVWDALVSPAPETPPPSVVRVDHLSPERWRAQIDAITDAIARGEFEKVVAARRTEVRTDRDLDAWAILRGLGARYPETWRFGLRFGQSTFLAATPERLFVKRGRLVETDALAGSIAANGEDAEARLLASAKDQREHRPVVEHLQARLGPLCTQLDAPDAPQLRRMPNILHLHTQLRGHLRAEVHAADLASALHPTPAVGGVPAEAAVQWIAAQEAHPRGWYAGPVGWLDADGDADFAVALRCGVIQGANAWAWAGGGIVEGSEPDAEWQESALKLRPFTHALGVDDDADRPK

SEQ ID NO: 94841 - protein, 474 aa, unidentified
  source 1..474: note = Unknown
  REGION 1..474: note = tr|A0A432GMG4|A0A432GMG4_9DELT Isochorismate synthase MenF OS=SAR324 cluster bacterium OX=2024889; GN = menF PE=3 SV=1
MLPANQPSIDYNLKVKPEKFQSLEDARCFLLKQVKEWDNSQNKSIPENSGVVRLEASLESAHPLEWLTLQDCSQKIYWENRSQKEQFAGIGTALEIADGKDGYENILQVISKILQDSPETVRFYGGMRFDSKASISPEWETWGTARFTIPLVELSIIEENVTLACNFLPGDKKNSKLQPLQNLLESLRTEDVIIPDNPLIGLERHDLPEYRQWCRLVEQGLENISSGKINKVVLARAAVFSLARDYDPTELLLQLGRHAPQAFHFCFQLAPNKAFLGITPELLYRRSGTQIGSEAIAGTRPRGQTLEDDQRLADELRNSEKEQREHLMVLDLMERVLKQFCRQTKRLSYLERLPLRHVQHLLSRMQGILRPNVNDSDLLPSFHPTPAVSGTPDPEAREIIRELEPFDRGWYAGPVGWINRNQAEFAVAIRSGLLCGRTLRVYTGAGIVAGSVPEEEWREIEVKLQSWKSLLGRS

SEQ ID NO: 94842 - protein, 503 aa, unidentified
  source 1..503: note = Schaalia canis
  REGION 1..503: note = tr|A0A3P1SEH2|A0A3P1SEH2_9ACTO Isochorismate synthase OS=Schaalia canis OX=100469 GN=EII11_05390 PE=4; SV = 1
MSDLSATLLPSPSTTPADAQLIVRIARIPVEHPAQTLSLHELLPADIDGTQAWFGHSRRMVGWGEAARITVVGPHAIRDAARTWDDLRGSARVECVCTPACADDEMPALPLAFGSFGFSATTPGFLIVPDVAVIEMPAGNDDTPHSTTALWGTDWGGLGPARGTRYVVTTQVARGEAGSVKSTAHEKGADSASAAAQTSSNDATSTGLDAPSLNDPLAVLDAALATRTAVAPNAPEGITTAPGRMTQAQWMASVSEVIELLRAGAASKVVMSRDMVVQSPTPIDPRFLLERLTTLYPTTWAYAVEGLIGATPEMLAAMHGGQVSSRVLAGTTSPGEGEALMSSMKDRTEHMFAVESVARALAPITQTLDVPEVPQVLDLPNVSHLATDVTATLASGNVLDVIAALHPTAAVCGTPTKLAFDILERFESTERGRYSGPVGWVDGAGEGEFGIALRCGQLSEAGRRLTILAGGGIMPDSIPEAELRETRAKMAPLLQALGMSIAG

SEQ ID NO: 94843 - protein, 478 aa, unidentified
  source 1..478: note = Schaalia cardiffensis
  REGION 1..478: note = tr|N6W633|N6W633_9ACTO Isochorismate synthase DhbC; OS = Schaalia cardiffensis F0333 OX=888050 GN=dhbC PE=4 SV=1
MVAMPNASTTESLHARAVSLAGTQWADTPPLHFLPEDPREDAVALAWLGFRCQMVGWGRAAAWKGSGVHAIGEAGAWWDRLRAASSVSVDVHGPHSKDRDSGERTSRAPLSGDSLSGDSLSGDSLSGDSLSGDSPSAEAASHLERALPSFPIAFGSFGFSARTESTLIVPSFLLIDTPEGRWAVSISSSSPMPDPLEVLASTTPTSPRPPRGLRTDVGRMTQREWRASVEALAARLRAGDASKAVMTRDMLVRADSAITVHYLLERLDSLYPQTWRFCVDSLIGASPEMLGSAADGVLHSRVLAGTSPAGRGAELLESEKNLREHTLAVESVASALRPIVDDLQVPETPFILDLPNVAHLASDVQARLGELSLLEAVAALHPTAAVCGTPRDLALELLEEHERTERGRYSGPVGWVDANGEGEFCIALRCGALEEEGRALRIFAGGGIMPDSDPGEELAETRRKMAPLLDALGVDTTA

SEQ ID NO: 94844 - protein, 428 aa, unidentified
  source 1..428: note = Schaalia odontolytica
  REGION 1..428: note = tr|D4U054|D4U054_9ACTO Isochorismate synthase; OS = Schaalia odontolytica F0309 OX=649742; GN = HMPREF0970_01591 PE=4 SV=1
MRQYSHVFQRAAAPAPTMEPMHNDFGCSRLVFRALVLPPQHPGSTCSLTSLLPDSGGSAWLGDRRQMIGLGRALTIESATPGAIADVRRAWEAAPASSCVEGAPSPVLFASFAFRSPARSVAFVPALTLIDEAGARWAITAGIGDAPDPLAAVDEALAEARPAPRVPESLTFGHGSMSRGQWRDSVRAMAQRLRDGAADKAVMARDMTVRCPHGFDERFLLERLSDLYPSTWRFCVDSLVGASPEMLIAASHGTASSRVLAGTCKPGEGEMLASSAKDLREHDLASESVSSILMQLCSSVTTQGPFLLSLPNVVHLATDVHARLGEAHLLDLVAALHPTAAVCGTPRPAAMRLIEELEDTERGRYSGPVGWVDTAGDGEFAISLRCGLTSGTRLRLFAGAGIMPDSDPDAELAETEAKMRPLLDALGV

SEQ ID NO: 94845 - protein, 411 aa, Schumannella sp.
  REGION 1..411: note = tr|A0A506XNZ9|A0A506XNZ9_9MICO Isochorismate synthase OS=Schumannella sp. 10F1B-5-1 OX=2590780; GN = FJ658_09240 PE=4 SV=1
MTDPADSVPALRVVTTPIAQLPSLLPLIDGVRPLVFLRRGDGVAGLGETLRLTFRGPDRIRDAAAVWKRIAAAATIDDPIGISGTGLIAFGAFAFADDSARESVLIVPRVIVGRRDGQSWVTRIDDADDALESTPLGPEYRLLLKPGAQGPDAYREAVAAAVQRIQSDAGLGKVVIARDKVGHLPEGADLRRVLTELALGYPDTWTFAVDGLLGSSPETLVRVAHGTVTARVLAGSAGRGKDAESDHAEALALATSQKDLDEHRFAVQSVLDALAPHSPSLVASELPFTLKLPNLWHLASDVEGTLADGSTALDLVCELHPTAAVAGTPRAAALATIAELEPFDRARWGGPVGWVDAAGNGKWAVALRSAEIDADGTITAYAGAGIVAESDPERELAETTLKFRPIVEAFG

SEQ ID NO: 94846 - protein, 466 aa, unidentified
  source 1..466: note = Scopulibacillus darangshiensis
  REGION 1..466: note = tr|A0A4R2P501|A0A4R2P501_9BACL Isochorismate synthase MenF OS=Scopulibacillus darangshiensis OX=442528; GN = menF PE=3 SV=1
MAIIEQHQLLENLKEGIKKAQFLSESVLVSYSKQIEFIDPLVFYRNGEILYKGSRIYWSDVEDVTMVGLGSAVVQAYNGEERFEKIEEYWRKVITGAVIHREVDVKGTGPVCMGGFSFDPVQMKTRLWKDFPDANFTVPNWLLTVKGNQCFLSINASVNEHMDPCTIESQLIDLEMQLLKNNTIPTPSQGESLMVEENQINEWLAMVHKSIDAINKGEMEKVVLSRTTTVTANKTFDQSSVLLALQERQSDCYTFAFEKGTSTFVGSTPERLIKKAGGKFNTMCLAGTISRGQTAEEDQKLGETLLSDPKNRDEHQMVVTMISDAMGKVCDKIVKSDSPQIYKSKDVQHLYTPIKGETKRELSLLSVVKALHPTPAMGGVPTEKAIEAIRERETYERGWYSAPIGWFDEDGDGEFVVAIRSGLITKENAVLFSGCGIVADSDPQSEYLETKIKFTPMLTALGGGWE

SEQ ID NO: 94847 - protein, 469 aa, unidentified
  source 1..469: note = Scytonema millei
  REGION 1..469: note = tr|A0A4V2X4L9|A0A4V2X4L9_9CYAN Isochorismate synthase OS=Scytonema millei VB511283 OX=1245923; GN = DYY89_10420 PE=4 SV=1
MLLLPRPANYHLNCQKLYQFLVASQKNCDRNCSQIVSISLEIDSIDPLVVLEKLARPRQLNFYFENKSKGEAIAAIDAVAQLQLAGANRFHLTQKFICSCLKEIEIFDSSNHTFAKPHFFCSFSFFSEATADSPFPVATVFLPRWQIARQGDRCVLVANLPIEADTNIDIFIQHLWRKIHEITSIEQPENEENHFQREFSQVNVSSIARFKQAVIDCSELIYKQQLSKVVLAHAIDVQVNTDFNLFNCLNRLRQMYPDCYVFSTHNGKGQNFIGASPERLISIRDRQLFTDALAGSISRGKTTAEDAVLANQLLQSEKERHEHRVVIDFITQSLQELSIAPQLLSPRLRRLANIQHLWTPIQARVPLNVHPLEIVAALHPTPAVGGVSRQLACKKIRTYEKFERGLYAAPLGWVNHQGDSEFIVGIRSALIDGDRARLYAGAGIVAGSNPDREIAEVQLKLQALLKALI

SEQ ID NO: 94848 - protein, 483 aa, Sedimenticola selenatireducens
  REGION 1..483: note = tr|A0A558DUP6|A0A558DUP6_9GAMM Isochorismate synthase OS=Sedimenticola selenatireducens OX=191960; GN = FHP88_13040 PE=4 SV=1
MRHPTGIQYHLHSNPYESRQRLMANRQSLIKATIARLKQALTHLPHEEVGPFSITLSTPELQLHHLPHLDNNWFYWGEPSHRHYRLGLGEALRLSSIGPLRLQQLSDQFERVRSNWIQIDPDCTGLQASAFTGFAFDPEDPMLQSWEGLPNAAIFLPELLLHQTAEMCAITFSFAHKDLTRATLRSQHLLQKLIDALGANPDPNPVPTRFSRTATTPSDDEWITQVNKATHSIREGTMDKVVPFRRISVQASQPFNPARLMASLDDLHPSSILFSIRVDGSTFAAATPEHLLSRQGHLISCDAIGGTIKRSPNPVDDTNLGKTLINDPKSRHEHALVVKGILGSLKKHCCKLTSPTGPSLKRLRNLQHLWTGIKGELWEDTTLLRVADDLHPTAAVSGFPSANAQRWLDDHKNTTRGWYTGAAGWIDIQGDGELAVLLRCALLNGEHAELFAGAGVTSESCPIAELQETELKFGTMLEALEHA

SEQ ID NO: 94849 - protein, 461 aa, unidentified
  source 1..461: note = Sedimenticola thiotaurini
  REGION 1..461: note = tr|A0A558DAD5|A0A558DAD5_9GAMM Isochorismate synthase OS=Sedimenticola thiotaurini OX=1543721; GN = FHK82_04565 PE=4 SV=1
MANRQPLIKAIIARLKTSLTGLPAESKGLFSVTLAVPELQLHLLPPLKNNWFYWGEPSRREYLLGLGEALRLSSRGSHRLKQLSDQFENIRSKWIQMDPDLTGLHATAFTGFAFNPDDPMIQAWTGLPNAAIFFPELLLHQTSEACAVTFTFTHTDSSRATLRSQHLLQELLDGLGANSGPKTRKTTLSRTGATPSNDEWINQVSSATSAIRMGRLDKVVPFRRISVKSTHPFNPARLMASLDDLHPSSILFSVRLDGSTFAAATPEHLITRQGNKISCDAIGGTIKRALNPDEDMKLGRSLLEDPKSRHEHALVVKGILDSLKSHCHNLTAATSPSLKRLRNLQHLWTGINGKLSGDTTLLRVANDLHPTAAVSGFPSASAERWLHDHKNNTRGWYTGAAGWLDNRGDGELAVLLRCALLNGERAELFAGAGVTSESCPIAELQETELKFGTMLEALEHA

SEQ ID NO: 94850 - protein, 463 aa, Sediminibacillus albus
  REGION 1..463: note = tr|A0A1G8Z2X0|A0A1G8Z2X0_9BACI Isochorismate synthase MenF OS=Sediminibacillus albus OX=407036 GN=menF; PE = 3 SV=1
MIDTEIKKLGQAVREAVRTAKIKQKPQLLSITEPLAAIDPFSFFDNAEKFTGGRIFWNNSAEGHWLAGAGEALALTAADHRFEETERQWKEMLENALIHNPHRVPGTGPIAFGGFSFDPDKETTPLWADFNSSLLRVPAYLLTMVNGDCFLTCNVVIYEYDQPEQIELQVENHKKQLLKQQAILPEGPVITDKQEIEPDSWKQLVRNATNTIKQGKAEKIVLAREMKVFFKNKVNVSPILRQLADMQTNSYIFAFENGEDCFLGATPERLVKVENQQLLSTCLAGTAPRGRTEAEDRKIGGQLLSDEKNRQEHHFVVEMIKKAVAACCENVQVPEAPVLYPLKNLQHLYTPVEAVLNENYTIIDIVKRLHPTPALGGMPSEKSVAFIREHENMDRGWYGAPIGWLDANHNGEFAVAIRSALIRGGEASLFAGCGVVRDSDPEAEYQETNIKFTPMLSVLGGRS

SEQ ID NO: 94851 - protein, 463 aa, Sediminibacillus halophilus
  REGION 1..463: note = tr|A0A1G9QPB3|A0A1G9QPB3_9BACI Isochorismate synthase MenF OS=Sediminibacillus halophilus OX=482461; GN = menF PE=3 SV=1
MIQTELKELGLAVEEAVTAARSKQDSQLLSFTEPVPAIDPISFFANGFSFDGGRIFWGNAAGSLMLAGAGEACALTASGNNRFEQMESKWKKIIQEAIIHNPQRKPGTGPIAFGGFSFDPAKPVTSLWKSFPDSKLRIPAYLLTVVNGKHYLTSNIVVNQDDRSADIEQRLEKERRLLLSATTLPDGPFVSSKSEVEPLAWKQLVRQATETIKQGGTEKIVLARELRVQFSDKANVAPVLNALTDSQTNSYIFAFENGDDCFLGATPERLVKIEDKKLLSTCLAGTAPRGITEAEDNRIGQQLLTDKKNRSEHQFVVEMIKKAVSACCEQVRVPDEPVLYPLKNLQHLYTPVEAVLHDGYTILDIVKQLHPTPALGGLPSEESVAFIREHEHLDRGWYGAPIGWLDAFQNGEFAVAIRSALIQGDHASLFAGCGVVKDSNPEEEYQETNIKFTPILSVLGGQS

SEQ ID NO: 94852 - protein, 429 aa, unidentified
  source 1..429: note = Senegalimassilia sp.
  REGION 1..429: note = tr|A0A4Q2JXN1|A0A4Q2JXN1_9ACTN Isochorismate synthase OS=Senegalimassilia sp. KGMB04484 OX=2509433; GN = ET524_04450 PE=4 SV=1
MTRIFSFTQPLDVDIVDAFCLLQKGFTDQFVYYRKDRPVRFMGLGRCIALPMLDDAECELSGPAGEQPVFFSFNRFDAHNPAPADELFQSFPSLHFMLPEVVLIENERGTFLQVNSLGPVYAGRVERFSRLALSARPRTRRSIDYTLTLDSRETWERAVDDGLAAIHAGRVDKVVLSRRLKVRAAEPFSSKDLLVNLIDGTAHGTVLLYRYADVFFCGCTPELLVRKRGADLESMCLAGTCPTSPDAQENARLAAALMADQKNRTEHDYVVRFIRDVLNRTCYSVDVPAQPTIMPLTCIQHLMTPARAKLLDGVDLWSMMGDLHPTPAVSGAPVGEAKMLIRQVEAYNRGFFAGACGYVDAAGDGEFSVALRTGVFDGEIGYVYAGCGIVDGSRAADEYDEIALKLKTVLSAFGGGTETVVAGVDGGAR

SEQ ID NO: 94853 - protein, 570 aa, Senna obtusifolia
  REGION 1..570: note = tr|V5N3N1|V5N3N1_9FABA Chloroplast isochorismate synthase OS=Senna obtusifolia OX=346985 GN=ICS PE=2 SV=1
MATGAAHSWLTSTKSAKSSSSTIMFGGSRSNSRESIHFMCHHHHHRPKFQGCCLSMNGCQTQRMKQHPTHTTAVNNVGTIETRSLPSVASPAMAMDSLNSAISHLVSHPPFTPSGIIRLQVPIEEQIEAMDWLHSQSDLLLPRCFFSGRPTHPYHANANNLVSVAGLGSAIFFRQLHPFSYNDWISIKRFLSETCPFIRAYGAIRFNAKGQVSSEWLPFGSFYFVIPQVEFDELEGTSMLAATIAWDNALSWPWENAINALQATLRKVSSFIVKFPKQAPRTSIVISHNIPSKVEWDLSVNRALHMIQKNHSLLKKVVLARSTRVVPTADIDPLSWLACLQVEGANAYQFLLQPPNAPAFIGNTPEQLFHRKFLHITSEALAGTRARGASAALDRQIELDLLSSPKDDIEFTIVRETIRSKLEAVCENVLVKPTKAIRKLPRIRHLFAQLTGRLQSEEDEFEILSSLHPSPAVCGFPTEEAQLLIAETEVFDRGMYAGPVGWFGGGESEFAVGIRSALVEKDVGALIYAGTGIVEGSNSYLEWDELELKTSQFTKLLKLDLPQRLKVDCI

SEQ ID NO: 94854 - protein, 442 aa, Serinicoccus sp.
  REGION 1..442: note = tr|A0A1B1NFE5|A0A1B1NFE5_9MICO Menaquinone-specific isochorismate synthase OS=Serinicoccus sp. JLT9 OX=1758689; GN = SGUI_2778 PE=4 SV=1
MTRTIPRLRARTLAVDAPGDLLTRVPDEVDPREVAAWLREGDGLVGWGRVAEITTTGPDRFGEAEAWWTEVRAAAEVEDEVRLPGTGLVTFGSFTFSPDSQDASVLTIPRIVIGRRDGLSWVTQVVAGDEPWPVEHPAELLGRTNADIAVLDPLTESEGSVGADAWPGVVAAAVRRIGRGEVDKVVLARDVRVRHREGRAVRIAPVLERLQSRYAATWTFAVAGLVGATPEMLVRLQGGRVRSRVLAGTIRRPNGIPAHDTAVPGAGDRAHPMDPRLRLVSSTKDLDEHAFAVRSVAEALAPHCSDLMVPDAPYVLELPDVYHLASDLTGTMHSEATSLRLAAALHPSAAVCGTPTEAAAAVIGELEGMDRGRYAGPVGWMDGSGDGDWGIALRCGELADDRHSMRIFAGGGIVAASDPAAELAETEVKLTAMRHALGLADA

SEQ ID NO: 94855 - protein, 395 aa, Serratia ficaria
  REGION 1..395: note = tr|A0A240C837|A0A240C837_SERFI Isochorismate synthase entC OS=Serratia ficaria OX=61651 GN=entC_2 PE=4; SV = 1
MATLTTENQTFPGFVYSEQSTFLYQSEFRSLSAQGVFERIETPAFGGERADSALAQNIGQALQRAKQAGQEAPVVVGAIPFDTRQPSCLYVPQQSRFVANDHYTRDARPMLQQHRLAACTSIPDEPRFKHAVAEAVSRFKQGRLSKAVLSRILEIELEQPVAGHQILNNLMVQNPNGYHFSLPLPDGGVLIGASPELLIRKQGGEIHSNPLAGSARRQADAQQDRIGSERLMRSTKDKYEHKLVIDDIRQRLAPLCATLSVPSGPSLMSTGTMWHLSTRIRGELRDPQLNVMQLACLLHPTPALCGFPTETARRLIADLEQYDRGLFSGIVGWCDANGDGEWAIVIRSGILRGNRVRLFAGAGIVEASTPQSEWAETAAKLGTMLNAFGLNSGAL

SEQ ID NO: 94856 - protein, 433 aa, Serratia fonticola
  REGION 1..433: note = tr|U2MFG3|U2MFG3_SERFO Isochorismate synthase MenF; OS = Serratia fonticola AU-P3(3) OX=1332070 GN=menF PE=3 SV=1
MEQLSGVLRRLRQQLGHDFPREAGFRQLTLVVPGHLSDMLLEWLAAQVLFPQFYWRHREGRQEAAVCGALRQFSHPSMAQAFVNAYPAARLWGLTAFDGDAQLFLPRLEILNRQGKCELTLNLFSEQALSDDAQAALAWLENLLVIKPIENLQVKVLSVQHQPERSGWEIMLRDALKAINRQQMDKVVLARSSVLTLESPLFAPAMMAASRRVNHQCYHFMLRFDAHSAFLGSSPERLYLREGKHLLTEALAGTVANHPDERQAQALAQWLLQDGKNQQENLLVVDDICQRLQGGARAVDVLPPEVVRLRKVQHLRRRIEGQLNQGDDADCLQRLQPTAAVAGLPRQASREFIRQHEPFSRGWYAGSAGYLSASQAEFCVALRSCQIEDARVELYAGAGIVAGSDPAQEWQEIENKAAGLRTLLQSEHSGQVH

SEQ ID NO: 94857 - protein, 402 aa, Serratia liquefaciens
  REGION 1..402: note = tr|A0A515CS29|A0A515CS29_SERLI Isochorismate synthase OS=Serratia liquefaciens OX=614 GN=EGO53_03875; PE = 4 SV=1
MSVTVKGTGQKKPHSKESESSVAGVSPTSGFFFTSPFRSLSTQGCFVKITLPAQGGDQLNGEFQQAVRHAFAEAKLAGVKNPVLCGAIPFDTHQPSALFIPQHTQWFERDAFLAGVTSPQEALPEIISQNEVPAQQPFMQMVADAVEATRGDQLDKVVLSRLLEIETREPVDSQALMARIIAQNPHGFHFHVPLEQGALLGASPELLLRKSGAQFYSNPLAGSARRDADPQRDREVSQQLLVSEKDLYEHQFVTEGMRQVLADRCSYLNIPTSPELLSTTTLWHLSTPIDGEAASRAENALSLACLLHPTPALCGTPTALAHQVIKQLEPFDRGLFGGIVGWCDAEGNGEWVVTIRCGTVQGNQVRLFAGAGIVQDSSPESEWHETGTKLSTISRAFGLNQG

SEQ ID NO: 94858 - protein, 396 aa, Serratia marcescens
  REGION 1..396: note = tr|A0A3E2EIK4|A0A3E2EIK4_SERMA Isochorismate synthase OS=Serratia marcescens subsp. sakuensis OX=211760; GN = E4655_19150 PE=4 SV=1
MATLTTENQTFPGFAYAEQSTFLYRSEFRSLSASGVFERIETPAFGGEQEGSALAQHIRQALARANAAGQETPVVVGAIPFDTRRPSCLYVPESYEFVANDSFTRAARPMLQQPHRLAACTSIPDEPRFKHAVAEAVSRFKQGKLDKAVLSRILDIELEQPVAGHQILNNLMVQNPTGYHFSLPLADGGVLIGASPELLIRKQGGEIHTNPLAGSARRQDDPQQDRLGSERLMRSTKDKYEHKLVIDDIRRHLAPLCASLSVPSGPSLLSTGTMWHLSTRIRGELLNPNLNVMQLACLLHPTPALCGFPTESARQLIADLEPHDRGLFSGIVGWCDANGDGEWAIVIRSGLLRGNRVRLFAGAGIVAASTPQSEWLETAAKLGTMLNAFGLNSGAL

SEQ ID NO: 94859 - protein, 401 aa, Serratia nematodiphila
  REGION 1..401: note = tr|A0A5C7D0R2|A0A5C7D0R2_9GAMM Isochorismate synthase OS=Serratia nematodiphila OX=458197; GN = FOT58_02660 PE=4 SV=1
MDTAVNDINRKEVQECEEQRFAADFSPASGFFFTSPFRSLTTTGCFSRIRLPAADGADLNGEFQRSVRQAFAEARQAGIKKPLLCGAIPFDTRQPSALFIPQQSRWFDRAAFMAGVRPAADGPELAGVTELPPQQPFMNMVSDAVDAMKAGELDKVVLSRLLEIETRQPVDRHALMARVIAQNPHGFHFHVPLEQGALLGASPELLLRQDGGRFYSNPLAGSARREADPERDREVGERLMASAKDRHEHRIVTESMRDVLAGRCRYLNVPHTPELLTTTTLWHLSTPIDGEAASPDENALSLACLLHPTPALCGMPTAEAHALIGKLEPFDRGLFGGIVGWCDDEGNGEWVVTIRCGTVDGNRVRLFAGAGIVEDSSPESEWHETGTKLSTILRAFGINQG

SEQ ID NO: 94860 - protein, 400 aa, Serratia odorifera
  REGION 1..400: note = tr|D4E3D2|D4E3D2_SEROD Isochorismate synthase; OS = Serratia odorifera DSM 4582 OX=667129 GN=entC PE=4 SV=1
MDTAMNGAKNMQSHSSEGGYLPPDLAAGFFFTSPFRSLSTQGCFAKVSLPAVGGDDVNGEFQQVVRHAFDEARLAGIKQPVLCGAIPFDTRQPSSLFIPRQTRWFDRNAFMAAQGIEHAAAPDIAHKTEVPAQAAFMQMVSDAVTATRAGTLDKVVLSRLLEIETCQPVDRHALMTRIIAQNPNGFHFHVPLADGALLGASPELLLRKTGAQFYSNPLAGSARREADPQRDREVSQQLLSSTKDHKEHRFVTEGMRAALSGRCRYLHIPNAPELLSTTTLWHLSTPIDGEVDPRQENALSLACLLHPTPALCGTPTRVARDLIAELEPFDRGVFGGIVGWCDAEGNGEWVVTIRCGTVSGNQVRLFAGAGIVQDSSPESEWHETGTKLSTILRAFGLNQG

SEQ ID NO: 94861 - protein, 430 aa, unidentified
  source 1..430: note = Serratia oryzae
  REGION 1..430: note = tr|A0A1S8CLT3|A0A1S8CLT3_9GAMM Isochorismate synthase MenF OS=Serratia oryzae OX=2034155 GN=menF PE=3; SV = 1
MEQLSGLLRQLRQQLEQDFPSAAGMRQITLPIPDRLAAMLLEWLAAQTQFPQFYWRHRDTQQEAAVCGAVRQFSHPLQAQAFLHAYPCARLWGLNAFDDSALLLLPRVEILSRSGKGQLTLNLFSESSLHEDAVTAGRWLDELRVAKPIAALQVKVQSVLHQPERPAWDAMLHDALKAIENQQLDKVVLARSTLLTLANPLFAPALMAASCKVNHLCYHFMMRFDAHSAFLGSSPERLYLREGQHLLTEALAGTVASHTDERQARALAQWLLQDAKNRQENLLVVDDICQRLQGGASAVDVLPPEVVRLRRVQHLRRQIEGQLNRGDDADCLQRLQPTAAVAGLPRQAARDFIRQHEPFSRHWYAGSAGYLSIAQSEFCVALRSTQIDGAQMQLYAGAGIVSGSDPAEEWQEIENKVAGLRTLLQPEGGF

SEQ ID NO: 94862 - protein, 402 aa, Serratia plymuthica
  REGION 1..402: note = tr|A0A447QAI5|A0A447QAI5_SERPL Isochorismate synthase entC OS=Serratia plymuthica OX=82996 GN=entC PE=4; SV = 1
MSATVKGAGQKKPQSKGSELNTAGVSPVSGFFFTSPFRSLSTQGCFAKITLPAVGGDQVNGEFQREVRHAFAEAKLAGVKNPVLCGAIPFDTHQPSALFIPQQTQWFERDAFLAGVMLPQDALPEITRQTEVPARQLFMQMVADAVQATRGDRLDKVVLSRLLEIETREPVDRQALMARIIAQNPSGFHFHVPLEQGALVGASPELLLRKSGAQFHSNPLAGSARRDADPLRDREISQQLLVSDKDLYEHKFVTEGMRQVLADRCRHLNIPSSPELLSTTTLWHLSTPIDGEAASRAENALSLACLLHPTPALCGTPTRLAHQVIKQLEPFDRGLFGGIVGWSDAEGNGEWVVTIRCGTVQGNQVRLFAGAGIVQDSSPESEWRETGTKLSTISRAFGLNQG

SEQ ID NO: 94863 - protein, 426 aa, Serratia proteamaculans
  REGION 1..426: note = tr|A0A1W5DMJ0|A0A1W5DMJ0_9GAMM Isochorismate synthase MenF OS=Serratia proteamaculans OX=28151 GN=menF; PE = 3 SV=1
MEQLSGLLRRLRQQLEQPFPAVGGFRQLSLPVPAPLADHLLEWLAAQAAFPQFYWRHRDGHEEAAVCGAVRQFSQPRQAQAFLREHEGARVWGLNAFDGMAHLFLPRLEILSRDGETQLTLNLFSASSLREDAALAGHWLEQLSVARPITPLKAQVTQVQHQPDPAGWEIMLHDALQAIGRQHMEKVVLARSTLLTLDCPLSAPAMMDASRRVNHRCYHFMLRFDADYAFLGSSPERLYLRNGRHLQTEALAGTVANHPNRQQAQALAQWLLQDGKNQHENLLVVDDICQRLQGGADAVDVLPPEVVRLRKVQHLRRRIEGRLNQGDDADCLQRLQPTAAVAGLPRQAAREFILQHEPFDRGWYAGSAGYLSSSRSEFCVSLRCAQLDDQGLWLYAGAGIVAGSDAAAEWQEIENKAAGLLSLLQP

SEQ ID NO: 94864 - protein, 402 aa, Serratia quinivorans
  REGION 1..402: note = tr|A0A380AFA3|A0A380AFA3_9GAMM Isochorismate synthase entC OS=Serratia quinivorans OX=137545 GN=entC; PE = 4 SV=1
MSVTLNSTGQKKPQSKDSEQAAANVSPTSGFFFTSPFRSLSTQGCFAKITMPAHNGDQLNGEFQQAVQHAFAEAKLAGVKNPVLCGAIPFDTHQPSALFIPQQTQWFERDAFLAGVTSPQDALPEIIRQNEVPAQQPFMQMVADAVEATRGDQLDKVVLSRLLEIETREPVDRQALMARIIAQNPHGFHFHVPLEQGALLGASPELLLRKSGAQFYSNPLAGSARRDADPQRDLEVSQQLLVSEKDRYEHQFVTEGMRQVLADRCRYLNIPTVPELLSTTTLWHLSTPIDGEAASRAENALSLACLLHPTPALCGTPTALAHQVIKQLEPFDRGLFGGIVGWCDAEGNGEWVVTIRCGTVQGNQVRLFAGAGIVQDSSPESEWHETGTKLSTISRAFGLNQG

SEQ ID NO: 94865 - protein, 281 aa, Serratia rubidaea
  REGION 1..281: note = tr|A0A4U9HM72|A0A4U9HM72_SERRU Menaquinone-specific isochorismate synthase OS=Serratia rubidaea OX=61652; GN = menF_2 PE=4 SV=1
MEHISALLQQLRQRLAQPFPDAAGFRQISLPVSDACSDDLLAWLAAQSTFPQFYWRHRDEQEEVAVCGALRQFSDAAAAQAFIAAHPTARVWGLTAFDGPSCLFLPRLAWQRRDKRASLTLNLFTENAAETADWLATLAPATPIAPLRTTVETVAHYPDAAGWTQMLQQALTAIAAERLEKVVLARCSRLTLAQPLPAPALMAASRRVNHRCYHFMLRFSAGSAFLGSSPERLYLRDGRRLLTEALAGTVANDGDDARAQQLAQWLLDDRKNQHEKPAGGG

SEQ ID NO: 94866 - protein, 430 aa, Serratia sp.
  REGION 1..430: note = tr|A0A2V1HDT6|A0A2V1HDT6_9GAMM Isochorismate synthase MenF OS=Serratia sp. S1B OX=2233853 GN=menF PE=3; SV = 1
MKQLSGLLRQLSQQLEQDFPLEAGFRQITLAVPGHLTVLLLEWLAAQRLFPQFYWCHRDGQQEVAVCGSARQFAQPSQAQAFVDAHPQVRLWGLNAFDGDSLLLLPRLEIFSCKGKGELTLNLFSEHALQEDARAARAWLGNLLVAKPIAGLQVKVRSVQHQPARSGWEIMLNDALKAIKSQQMDKVVLARSSLLTLDSPLFAPALMAASRRVNHQCYHFMLRIDAHSAFLGSSPERLYRREGHNLFTEALAGTVSNHQNEQQAQALAQWLLQDSKNQQENLLVVDDICQRLQGGASAVDVLPPEVVRLRKVQHLRRRIEAQLNGSDDADCLLRLQPTAAVAGLPRQAARDFIRQHEPFSRHWYAGSAGYLSATQAEFCVALRSCQVEGAEIQLYAGAGIVAGSDPTQEWQEVESKEAGLRTLLQPEEES

SEQ ID NO: 94867 - protein, 401 aa, Serratia symbiotica
  REGION 1..401: note = tr|A0A068YVL2|A0A068YVL2_9GAMM Isochorismate synthase 1 OS=Serratia symbiotica OX=138074 GN=entC PE=4; SV = 1
MSITAKGTSLQALQNSVAKQCCTDISPTSGFFFTSPFRSLITAGCFTQVTQPAAEGGDLQGKFQQQVRQAFAEARVAGIKQPLLCGAIPFDTQQPSALFIPYESRCFDRAAFVAGLSPLATGPEIASIAEVPTQQSFMQMVSDAVVAMKTEQLDKVVLSRLLEIETCQPVDCHALMARVIVQNPHGFHFHVPLERGALLGASPELLLRQSNGRFYSNPLAGSARRVADAECDLVVGQQLMASKKDRHEHRIVTEGIRQVLASRSHYLNVPQFPELLTTTTLWHLSTPIDGEVASRDESALSLACLLHPTPALCGMPAAAAHALIKQLEPFDRGLFGGIVGWCDAVGNGEWVVTIRCGTVDGNQVRLFAGAGIVPGSSPESEWHETDTKLSTILRAFGLHQG

SEQ ID NO: 94868 - protein, 401 aa, Serratia ureilytica
  REGION 1..401: note = tr|A0A5C7BHY3|A0A5C7BHY3_9GAMM Isochorismate synthase OS=Serratia ureilytica OX=300181 GN=FOT63_24105; PE = 4 SV=1
MVTAVNDINRKEMQEREEHRFAADFSPASGFFFTSPYRSLTTTGCFSRIRLPAADGADLNGEFQRRVRQAFAEARQAGIKKPLLCGAIPFDTRQPSALFVPQQSRWFDRAAFMAGVRPSANGPELAGVTELPPQQTFMNMVSDAVAAMKAGELDKVVLSRLLEIETRQPVDRHALMARVIAQNPHGFHFHVPLEQGALLGASPELLLRQDGGRFYSNPLAGSARREADPQRDREVGERLMASAKDRHEHRIVTESMRDVLAGRCRYLNVPHTPELLTTTTLWHLSTPIDGEAASPDENALSLACLLHPTPALCGMPTAEAHALIGKLEPFDRGLFGGIVGWCDDEGNGEWVVTIRCGTVDGNRVRLFAGAGIVEDSSPESEWHETGTKLSTILRAFGMNQG

SEQ ID NO: 94869 - protein, 452 aa, Shewanella algae
  REGION 1..452: note = tr|A0A1S2TVE5|A0A1S2TVE5_9GAMM Isochorismate synthase MenF OS=Shewanella algae OX=38313 GN=menF PE=3; SV = 1
MSALTLSQAISSLQDKLCQLTKPTPAEPIVQLAAEVQAIPLISWLASQPSYPRIYWQGRDRLEEVAAIGSCLDFRFEDEVTDEALAEVYETQRAYSSNQEIRYYGGVAFDREIASWPEFGRARFLLPRIELRRSSDHFRLLVNLNLGQADQQQEIAQAQAALDALVPARPMTPPTKTEQLSRNDRPDYPRWKALVEQVTAPRFNQDTPKVVLSRLTQLQVKDTPDPWQVLASWQGRNPNSFQFGFEFSPERSFISCSPERLYRRQQQELYTEALAGTTVRGLSPEEDERLAQQLLDDNKNSHENQLVREHIVKALTPLSRYVGADETPTIFKLNHIQHLHRSIRAELRHGVKDFQLLQALHPTPAVGGLPRESAISFLRQREGYMRGWYAGACGYLNKYESEFAVAIRCALLEPGCINLFAGAGIVAGSDPAAEWQELENKLATIMSILLDF

SEQ ID NO: 94870 - protein, 452 aa, Shewanella amazonensis
  REGION 1..452: note = tr|A1S1T6|A1S1T6_SHEAM Isochorismate synthase MenF; OS = Shewanella amazonensis (strain ATCC BAA-1098 / SB2B); OX = 326297 GN=menF PE=3 SV=1
MSVMSLPDALLSLEAKIQHLSTTQGSEPLVQLTEAVPALPLISWLASQELYPRIYWHGRDKEEEVAAIGCTCDFFFDDQVADQQLAEVYQRQRALSYNQNFRYYGGVAFDREVEGWPEFGRARFVLPRIELRRSGKEFKLLLNLNFDGNDRHAECQAALQALSSLKRPKPLTPPGKVNLLGRSEYPEYPRWQQLVEQVTADKFNRHTPKVVLSRLSQLEINDPVDPWMVLACWQGRCPSSFQFGFQFSKDRTFISCSPERLYLRRGQELFTEALAGTTLRGHTEEEDALLAKQLQEDSKNSHENQLVRQHIVEHLSPLSHYVGAEESPRIFKLPHIQHLHRAIRAELKPGINDFQLLLALHPTPAVGGLPRPSALSFIRQQEGYNRGWYAGACGYLNRHESEFSVAIRSALIEPGRINLFAGAGIVAGSDPEAEWQELDNKLATILSILVEL

SEQ ID NO: 94871 - protein, 452 aa, Shewanella atlantica
  REGION 1..452: note = tr|A0A3S0IND2|A0A3S0IND2_9GAMM Isochorismate synthase MenF OS=Shewanella atlantica OX=271099 GN=menF; PE = 3 SV=1
MTAFPLSQAISSLTDKLKQLKFQSHSDPIIQVSVPISAMPAIAWLAAQPIYPRIYWKGRDTEEEVAAIGSCKDFTYEEAVDDNQLSLEYQKQRALSNNQDIRYYGGVAFDRTTECWPEFGRAHFVLPRIELRRSGEEYKLLINLNCESNEPEAERALAIEALAKLVSPRPLPPPNKINLLSRSDRPDRYHWTELVKKVTHEKFIQDTPKVVLSRLTQLEVDEEVDPWMLLACWQGRNQNSFQFGFQFSPERAFISCTPERLYRRRQRELFTEALAGTTTRGLNQEEDRALAQQLLEDNKNSHENQLVKEHIVDALTPLSNYVGAEETPRVFKLSHIQHLHRSIRAELKPGIDDFQLLQALHPTPAVGGLPKEPAMNFIRQREGYARGWYAGACGYFNKYESEFAVAIRSALIEPGRINLFAGAGIVSGSEPEAEWVELENKLTTILSILTEL

SEQ ID NO: 94872 - protein, 452 aa, Shewanella baltica
  REGION 1..452: note = tr|A0A165KQ07|A0A165KQ07_9GAMM Isochorismate synthase MenF OS=Shewanella baltica OX=62322 GN=menF PE=3; SV = 1
MPVHALSEDLKSLIDKLIQLKQVPPTEPIVQLSLNTVAMPLISWLASQTQFPRIYWHGRDRIEEVAAIGACKDFRFETGINDQQLAMAYQEQRALSTNQNIRYYGGVAFDRTIESWPEFGNSRFILPRIEFRRSGSRFSLLVNLNFAENDHHSEIDKAIAAIEAVMPAKPLSPPKKIVPLGRSDKPDFERWKTLVEQVVEPKFNQDTPKVVLSRLTQLEVNEPIDPWMVLACWQGRNPNSFQFGFQFSPERTFISCSPERLFRRRQQELFTEALAGTTVRGLSQEEDIALANALLEDNKNSVENQLVRSHIVNMLTPLSNYVGADELATIFKLNHIQHLHRAIRAELKPGVNDFQLLQALHPTPAVGGLPRHSALNFIRQREGYTRGWYAGACGYFNKYESEFSVAIRSALIEPGRINLFAGAGIIAGSEPEAEWQELENKLATIMSILFEM

SEQ ID NO: 94873 - protein, 448 aa, Shewanella benthica
  REGION 1..448: note = tr|A9CYB8|A9CYB8_9GAMM Isochorismate synthase MenF; OS = Shewanella benthica KT99 OX=314608 GN=menF PE=3 SV=1
MLSQAISSLTDKLKQFNFQSPSDPIIQLSVNIKALPVIAWLSAQPIYPRIYWKGRDTEEEVSAIGSCKDFFYDEAVDDNQLAMAYQKQRALTNNQDIRYYGGVAFDRTTEPWPEFGRARFVLPRIELRRSGTEYKLLVNLNCENQDLESERQQAIESLASLAAPKPLPPPNKVSLLSRNDRPDHYHWTELVNRVTHPKFIKETPKVVLSRLTQLEVNEEINPWMLLACWQGRNPNSFQFGFQFSPDRTFISCTPERLFRRRQRELFTEALAGTTTRGLNQEEDALLAKQLMEDSKNSHENQLVKQHIVDVLTPLSNYVGAEETPKVFKLSHIQHLHRSIRAELKPGVDDFQLLLALHPTPAVGGLPKEPAMNFIRQREGYNRGWYAGACGYFNKYESEFAVAIRSALIEPGRINLFAGAGIVSGSEADAEWVELENKLATILSILTEI

SEQ ID NO: 94874 - protein, 452 aa, unidentified
  source 1..452: note = Shewanella bicestrii
  REGION 1..452: note = tr|A0A220USC6|A0A220USC6_9GAMM Isochorismate synthase MenF OS=Shewanella bicestrii OX=2018305 GN=menF; PE = 3 SV=1
MPAHALSEDLKSLIDKLIQLKQVPPTEPIVQLSLTTVSIPLISWLASQNQYPRIYWHGRDKVEEVAAIGACKDFKFETGVDDDTLAEIYQQQRALTTNPEIRYYGGVAFDRSIESWPEFGNSRFVLPRIEFRRSANQFSLRVNLNFADRHPEEEIDLAITAIEAVLPARPLAPPNKLALLSRTDIPDFPRWKTLIEQVVEPKFNQETPKVVLSRHTELEVNAQVDPWMVLACWQGRNPNSFQFGFQFSPERTYISCSPERLFRRRQQELFTEALAGTTVRGLNQEEDTALANALLEDNKNSIENQLVRRHIVSMLSPLSQHVGAEETATIFKLNHIQHLHRAIRAELKQGVNDFQLLQALHPTPAVGGLPRESAMRFIREREGYMRGWYAGACGYFNKYESEFSVAIRSALIEPGKINLFAGAGIIAGSDPEAEWQELENKLATIMSILIEL

SEQ ID NO: 94875 - protein, 452 aa, Shewanella canadensis
  REGION 1..452: note = tr|A0A3S0KUW0|A0A3S0KUW0_9GAMM Isochorismate synthase MenF OS=Shewanella canadensis OX=271096 GN=menF; PE = 3 SV=1
MAAFLLSQAISTLTDKLKQLKFQSHSDPIIQVSVPISPMPAIAWLAAQPIYPRIYWKGRDTEEEVAAVGSCKDFAYEEAVDDNQLSQAYQKQRALSNNQDIRYYGGVAFDRTTECWPEFGRAHFVLPRIELRRSGEEYKLLINLNCESNETETERTKAIEDLAKLVSPRPLPPPNKINLLSRSDRPDHYHWTELVKKVTHEKFIQDTPKVVLSRLTQLEVDEEVDPWTLLACWQGRNQNSFQFGFQFSPERAFISCTPERLYRRRQRELFTEALAGTTTRGLNQEEDRVLAQQLLEDSKNSHENQLVKEHIVDALTPLSNYVGAEETPRVFKLSHIQHLHRSIRAELKAGIDDFQLLQALHPTPAVGGLPKEPAMSFIRQREGYARGWYAGACGYFNKYESEFAVAIRSALIEPGRINLFAGAGIVSGSEPEAEWVELENKLTTILSILTEL

SEQ ID NO: 94876 - protein, 452 aa, Shewanella chilikensis
  REGION 1..452: note = tr|A0A2V4WEF6|A0A2V4WEF6_9GAMM Isochorismate synthase MenF OS=Shewanella chilikensis OX=558541 GN=menF; PE = 3 SV=1
MSALTLSQAISSLKDKLCQLAKLTPAEPIVQLAAEVQAIPLISWLASQPSYPRIYWQGRDRLEEVAAIGSCLDFRFEDEVTDEALAEVYETQRAYSSNQEIRYYGGVAFDREIASWPEFGRARFLLPRIELRRSSDYFRLLVNLNLGQGDQQQEIAQAQAALDALVPARPMTPPTKTEQLSRNDRPDYPRWKTLVEQVTAPRFNQDTPKVVLSRLTQLQVKDTPDPWQVLASWQGRNPNSFQFGFEFSPERSFISCSPERLYRRQQQELYTEALAGTTIRGLSPEEDERLAQQLLDDNKNSNENQLVREHIVKALTPLSRYVGADETPTIFKLNHIQHLHRSIRAELRHGVKDFQLLQALHPTPAVGGLPRESAISFLRQREGYMRGWYAGACGYLNKYESEFAVAIRCALLEPGCINLFAGAGIVAGSDPQAEWQELENKLATIMSILLDF

SEQ ID NO: 94877 - protein, 452 aa, Shewanella colwelliana
  REGION 1..452: note = tr|A0A1E5IYY3|A0A1E5IYY3_SHECO Isochorismate synthase MenF OS=Shewanella colwelliana OX=23 GN=menF PE=3; SV = 1
MSVFSLSQAIQSLVSKLERLDIHQHGEPIIQVSVPVCPLPTIAWLASQPCYPRIYWRGRDTQEEVAAIGSCKDFIFEDAVDDNQLSLAYQQQRALSTNQDIRYYGGVAFDRDTDCWPEYGKAHFVLPRLELRRSGHDYKLVINLNIENEEIEQERQNALQALQQLASPSPLSPPNKIHLLSRSDRPDHRRWTELVNQVTHEKFIKQTPKVVLSRLTQLEINEKIDPWMLLASWQGRNQNSFQFGFQFSPDSAFISCTPERLYRRRQRELFTEALAGTTTRGLNEEEDAMLAQQLLDDSKNSHENQLVRKHIVDALTPLSNYVGADESPKVFKLSHIQHLHRAIRAELKGGVNDFQILQALHPTPAVGGLPKESAINFIRQREGYTRGWYAGACGYFNKHESEFAVAIRSALIEPGRINLFAGAGIVSGSEADAEWHELENKLATILSILTEV

SEQ ID NO: 94878 - protein, 452 aa, Shewanella decolorationis
  REGION 1..452: note = tr|A0A5B8R2X9|A0A5B8R2X9_9GAMM Isochorismate synthase MenF OS=Shewanella decolorationis OX=256839; GN = menF PE=3 SV=1
MPAHALSEDLKSLIDKLIQLKQVPPTEPIVQLSLTTVSIPLISWLASQHQYPRIYWHGRDKVEEVAAIGACKDFKFETGVDDKTLANVYEQQRALSSNPEIRYYGGVAFDRSIESWPEFGNSRFVLPRIEFRRSNNQFSLRVNLNFADSTPEEEINRAIAAIEAVMPARPLAPPNKLTLLSRNDTPDFPRWKTLVEQVVEPKFNQETPKVVLSRHTELEVNAQVDPWMVLACWQGRNPNSFQFGFQFSPDRTYISCSPERLFRRRQQELFTEALAGTTVRGLNQEEDTALANALLEDNKNSVENQLVRRHIVSMLSPLSQHVSAEEAATIFKLNHIQHLHRAIRAELKQGVNDFQLLQALHPTPAVGGLPRQSAMNFIREREGYMRGWYAGACGYFNKYESEFSVAIRSALIEPGKINLFAGAGIIAGSDPEAEWQELENKLATIMSILIEL

SEQ ID NO: 94879 - protein, 452 aa, Shewanella fodinae
  REGION 1..452: note = tr|A0A4R2F9I1|A0A4R2F9I1_9GAMM Isochorismate synthase MenF OS=Shewanella fodinae OX=552357 GN=menF PE=3; SV = 1
MSVLSLSKAVSSLSDRLSQLFDHSQQSGILQLVEDVSLPPLMSWLAAQNQFPKIYWQGRDRREEVAAIGSCLDLSFIEAVDDSKLQQIYQQYCQQPHSVDVRFYGGVAFDRTLPSWPEFGRARFLVPRVELRRQEDSAQLLVNLNLNEQSLAQQVQQALAVLAQLCPAQPLLPPQKTEVLSRVDVPDFSRWSQLVTEVTSPAFNCHTPKVVLSRQSKLHVTQTPDPWTVLACWQGRNPTSFQFGFQFSPEHSFISCTPERLYRRRQDQLVTEALAGTTVRGLTADEDEKLAQQLLDDHKNSHENQFVGTHIVSELTPLSVQVNADEPLKIFKLNHIQHLHRVIKAQLRHDVSDFQLLQSLHPTPAVGGFPKKAALQYIAANEGYNRGWYAGTCGFLSSQLSEFAVAIRSALLEPGCINLFAGAGILTGSDPSLEWQELENKLATIMSILVDF

SEQ ID NO: 94880 - protein, 460 aa, Shewanella frigidimarina
  REGION 1..460: note = tr|A0A106BY05|A0A106BY05_SHEFR Isochorismate synthase MenF OS=Shewanella frigidimarina OX=56812 GN=menF; PE = 3 SV=1
MLLYERYRLAGHFFSSQFSELITKLEQLRNVPICDPIVQLSVEAPALPLISWLSAQTLYPKIYWHGRDRNEDVAAIGSCKTFYFADQVDDNALAQIYQQQRNKTNHQDIRYYGGLAFDRTVECWPEFGRAHFVLPRIELRRSGNHVRVLVNLNFENGEPKDEIQSALNAIAMVQKPRPLSPPNKLTLMGRSDLPNFARWKELVEQVTQANFITSTPKVVLSRHSQIDVDDNIDPWTVLACWQGRNPNSFQFGFQFSPERAFISCSPERLYLRRQQELFTEALAGTTVRGHNPEEDNVLAQALLDDIKNSHENQLVRKHIVDVLTPLSQYVGADEQPKIFKLNHIQHLHRAIRAQLKPGVNDFELLRALHPTPAVGGLPRDAALNFIRQREGYARGWYAGACGYLNHHESEFSVAIRSALIEPRRINLFAGAGIVAGSDPEAEWQELENKLATVLSILIDF

SEQ ID NO: 94881 - protein, 452 aa, Shewanella halifaxensis
  REGION 1..452: note = tr|B0TN19|B0TN19_SHEHH Isochorismate synthase MenF; OS = Shewanella halifaxensis (strain HAW-EB4) OX=458817; GN = menF PE=3 SV=1
MTIPLLPQAVKSLTDKIKSFTLQPNSDPIVQLSVVVSPIPVIAWLAAQSTYPRVYWKGRDTEEEVAAIGSCKDFFFGDEVDDIELSVEYQKQRALTNNQEIRYYGGVAFDRRNESWPDFGKAHFVLPRIELRRSGNDYKLLVNLNFTEQEFTQEIDDALQSLQALDAPKPLAPPNKVALMGRSDRPDRYRWDELVNRVTHPKFIEDTPKVVLSRLTQLEINEQVDPWMLLACWQGRNPNSFQFGFQFSPDSTFISCTPERLYRRRQRELFTEALAGTTIRGLNQEEDKALAQELLDDTKNSHENQLVRQHIVDVLNPLSNYVGAEETPTVFKLSHIQHLHRSIRAELKPGVNDFQLIQALHPTPAVGGLPKESAMNFIRQQEGYVRGWYAGACGYFNKYESEFAVAIRSALIEPGRINLFAGAGIVAGSEADKEWTELENKLTTILSILTEL

SEQ ID NO: 94882 - protein, 452 aa, Shewanella hanedai
  REGION 1..452: note = tr|A0A553JQ62|A0A553JQ62_SHEHA Isochorismate synthase MenF OS=Shewanella hanedai OX=25 GN=menF PE=3 SV=1
MAAFSLSQAISSLTDTLKKLTFQTQSDPIIQLSIPIKPVPAIAWLAAQPCYPRIYWKGRDTEEEVAAIGCCKDFFYADGIDDNQLSAEYQKQRALSNNQDIRYYGGVAFDRTTECWPEFGRAHFVLPRIELRRNGHDYKLLVNLNCDSENAESERKQAIDSLMELAPPKPLPPPNKISLLSRSDRPNRYRWTELVNQVTHQKFIKETPKVVLSRLTQLEVNQVVDPWMLLACWQGRNQNSFQFGFQFSADRTFISCTPERLYRRRQRELFTEALAGTTTRGLNLEEDDVLAQTLLEDNKNSHENRLVKDHIVGALAPLSNYVGAESCPKIFKLSHIQHLHRSIRAELKPGVDDFQLLQALHPTPAVGGLPKEPAMNFIRQSEGYARGWYAGACGYFNKHESEFAVAIRSALIEPGRINLFAGAGIVSGSEADAEWVELENKLTTILSILTEL

SEQ ID NO: 94883 - protein, 460 aa, Shewanella livingstonensis
  REGION 1..460: note = tr|A0A3G8LR46|A0A3G8LR46_9GAMM Isochorismate synthase MenF OS=Shewanella livingstonensis OX=150120; GN = menF PE=3 SV=1
MLLYERRRLTGHFFSSQFSELITKIEQLRNIPICDPIVQLSVNAPALPLISWLSAQTLYPKVYWHGRDRNEDVAAIGSCKTFYFADQIDDNALAQIYQQQRSKTNHQDIRYYGGLAFDRTVECWPEFGRAHFILPRIELRRSGNHVRVLVNLNFENGETEAEIQAALDAIKTVQKPRPLSPPNKLTLMGRSDLPNFARWKELVEQVTQANFIKSIPKVVLSRHSQIDVDDNIDPWTVLACWQGRNPNSFQFGFQFSPERAFISCSPERLYLRRQQELFTEALAGTTIRGLNPDEDNLLAQALLDDIKNSHENQLVREHIVDVLTPLSQYVGADEQPKIFKLNHIQHLHRAIRAQLKPGVSDFELLRALHPTPAVGGLPRDAALNFIRQREGYARGWYAGACGYLNRHESEFSVAIRSALIEPRRINLFAGAGIVAGSDPEAEWQELENKLATVLSILIDF

SEQ ID NO: 94884 - protein, 452 aa, Shewanella loihica
  REGION 1..452: note = tr|A3QJ95|A3QJ95_SHELP Isochorismate synthase MenF; OS = Shewanella loihica (strain ATCC BAA-1088 / PV-4); OX = 323850 GN=menF PE=3 SV=1
MSVSSLPQAIQSLSRKLEKLDIHPQGEPIIQLSVTACVMPMIAWIASQPCYPRIYWHGRDTQEEVAALGCCKDFIFEDAVDDNQLSQAYQTQRSLSTNQEIRYYGGVAFDRHTECWPEYGRAHFILPRVELRRSGDEYKLLVNLNVESGDIEQERNLALQALAALVPPKPLAPPNKIQLLSRSDRPNKLRWHELVNQVTHDRFIQDTPKVVLSRLTQLEVNEKVDPWMLLASWQGRNQNSFQFGFQFSPESAFISCTPERLYRRRQREVFTEALAGTTTRGLNEAEDAMLAQQLLDDTKNSHENQLVREHIVDALTPLSNYVGADELAKVFKLSHIQHLHRAIRAELKPGVNDFQILQALHPTPAVGGLPKASAINFIRQREGYTRGWYAGACGYFNKYESEFAVAIRSALIEPGRINLFAGAGIVSGSEAEAEWNELENKLKTIMSILTEV

SEQ ID NO: 94885 - protein, 452 aa, unidentified
  source 1..452: note = Shewanella mangrovi
  REGION 1..452: note = tr|A0A094JHS1|A0A094JHS1_9GAMM Isochorismate synthase MenF OS=Shewanella mangrovi OX=1515746 GN=menF; PE = 3 SV=1
MSVTSLSQAVKSLQQRLTELTLSEVQAPVLQLKQPIDTLPLMAWLATQHSFPKIYWHGRNNDEEAAAIGSCHQFFFEQTVTDEQLASVYQQQLSCLAEPDIRYYGGIAFDRREASWPEFGRVRFILPRLELRRQDEHYQLLLNLYLAEGDAQYELARARDALQALVPAAPLAPPRKTEVLERRDTPNQQRWQQLVSMVTEPQFNADTPKVVLSRHTQLKVADAPDPWTVLASWQGRNPNSFQFGFQFSPERSFISCTPERLFQRHEHELKTEALAGTTVRGMTAAEDQLLAQQLLDDAKNSVENQFVRTHIVNELNPLSDEVDGNAPLAIFKLNHIQHLHRIIRAKLKHNVNDFQLLQAMHPTPAVGGLPKQSAMDFIREYEGYNRGWYAGACGYLSRHVSEFAVAIRSALLEPGTINLFAGAGILAGSDPQSEWQELENKLATIMSILVDF

SEQ ID NO: 94886 - protein, 452 aa, Shewanella morhuae
  REGION 1..452: note = tr|A0A1N7A3P6|A0A1N7A3P6_9GAMM Isochorismate synthase MenF OS=Shewanella morhuae OX=365591 GN=menF PE=3; SV = 1
MPVHALSEDLKSLIDKLIQLKLTPVVEGLVQLSVSTVALPLIPWLASQTLFPRIYWHGRDRIEEVAAIGACKDIKFETAMSDQQLATIYQEQRALSTNQNIRYYGGVAFDRTIDSWPEFGNSRFILPRIEFRRSGNQFSLLVNLNFADNDHHSEIDNAIAAIEAIMPAKPLSPPKKIGLRGRTDTPNFTRWKTLVEQVIEPKFNQDTPKVVLSRLTQLDVNEPVDPWMVLACWQGRNPNSFQFGFQFSPERTFISCSPERLFRRNQQELFTEALAGTTIRGLSQEEDIALANALLEDNKNSVENQLVRSHIVNMLTPLSRYVGADELATIFKLNHIQHLHRAIHAELKTGVNDFQLLQALHPTPAVGGLPRHSAMSFIRQQEGYMRGWYAGACGYFNQYESEFSVAIRSALIEPGRINLFAGAGIIAGSDPQAEWQELENKLATIVSILFEL

SEQ ID NO: 94887 - protein, 452 aa, Shewanella oneidensis
  REGION 1..452: note = tr|A0A2W5E628|A0A2W5E628_SHEOE Isochorismate synthase MenF OS=Shewanella oneidensis OX=70863 GN=menF; PE = 3 SV=1
MPAHALSEDLKSLIDKLIQMKQVPASEPIVQLSLTTVSIPLISWLASQTQYPRIYWHGRDKIEEVAAIGACKDIKFETGVQDNELASVYERQRVLSSNPDIRYYGGVAFDRSIESWPEFGNSRFVLPRIEFRRSADQFSLRVNLNFADNNPIDEIDLAIAAIEAVMPARPLAPPNKLTLESRQDIPDFPRWKTLVEQVVEPEFNQDTPKVVLSRLTELKVNEQVDPWMVLACWQGRNPNSFQFGFQFSPERTYISCSPERLFRRRRQQLFTEALAGTTVRGLNKEEDVALANALLEDNKNSVENQLVRRHIVNMLTPLSQYVGAEEAATIFKLNHIQHLHRAIRAELKPGVNDFQLLQALHPTPAVGGLPRESAMKFIRQREGYMRGWYAGACGYFNQDESEFSVAIRSALIEPGKINLFAGAGIIAGSDPKAEWQELENKLATIMSILIEL

SEQ ID NO: 94888 - protein, 452 aa, Shewanella pealeana
  REGION 1..452: note = tr|A8HA12|A8HA12_SHEPA Isochorismate synthase MenF; OS = Shewanella pealeana (strain ATCC 700345 / ANG-SQ1); OX = 398579 GN=menF PE=3 SV=1
MTIPLLPQAIKSLTDKIKSFTLQPNSDPIAQLSVVISPIPVIAWLSAQTTYPRVYWKGRDTEEEVAAIGCCKDFFFNDDVDDIELAAEYQKQRALTSNQEIRYYGGVAFDRRNESWPEFGKAHFVLPRIELRRSGNEYRLLVNLNFSENSFAEEIELAVQSLQKLDSPKPLSPPNKVALMGRSDRPDRYRWNELVNRVTHPKFIQDTPKVVLSRVTQLEINEEVDPWMLLACWQGRNPNSFQFGFQFSPESAFISCTPERLYRRRQRELFTEALAGTTVRGLNQEQDKALAQALLDDSKNSHENQLVRQHIVDVLNPLSNYVGAEETPTIFKLSHIQHLHRSIRAELKAGVSDFQVIQALHPTPAVGGLPKESAMSFIRQQEGYVRGWYAGACGYFNKYESEFAVAIRSALIEPGRINLFAGAGIVAGSEADKEWVELENKLTTILSILTEL

SEQ ID NO: 94889 - protein, 452 aa, Shewanella piezotolerans
  REGION 1..452: note = tr|B8CVB2|B8CVB2_SHEPW Isochorismate synthase MenF; OS = Shewanella piezotolerans (strain WP3 / JCM 13877); OX = 225849 GN=menF PE=3 SV=1
MTAPLLSHAIKSLTDKLTSFTLQPHSDPIIQLSVTVSAIPVIAWLAAQSTYPRIYWKGRDTEEEVAAIGCCKDFFFGDDVDDLEMSAEYQKQRALTNNQDVRYYGGVAFDRKNESWPEFGKARFILPRIELRRSGNEFKLLVNLNFTENSFEEEIAYALHAIASLDKPKPLAPPNKVALMGRSDKPDRYRWTELVNQVTHPKFIKETPKVVLSRQTQLEINEQVDPWTLLACWQGRNPNSFQFGFQFSPESAFISCTPERLYRRRQRELFTEALAGTTVRGINQEQDKALAQELLDDTKNSHENQLVRQQIVDVLNPLSHYVGAEEFPTVLKLSHIQHLHRSIRAELKAGVNDFQLIQALHPTPAVGGLPKEPAMNFIRQQEGYVRGWYAGACGYFNKHESEFAVAIRSARIEPGRINLFAGAGIVTGSEADKEWSELENKLTTILSILTEL

SEQ ID NO: 94890 - protein, 452 aa, Shewanella psychrophila
  REGION 1..452: note = tr|A0A1S6HIP5|A0A1S6HIP5_9GAMM Isochorismate synthase MenF OS=Shewanella psychrophila OX=225848 GN=menF; PE = 3 SV=1
MAALILSQAISSLTDKLKQFNFQSPSDPIIQLSVSIKAIPAIAWLSAQPIYPRIYWKGRDTEEEVSAIGNCKDFFYEEASDDNQLAMAYQEQRALSNNQDIRYYGGVAFDRTTESWPEFGRARFVLPRIELRRSGTEYKLLVNLNCENQDTESERRNAIDSLASLAAPKPLPPPNKVSLLGRNDRPDRYHWTELVNKVTHPKFIKETPKVVLSRLTQLEINEEINPWMLLACWQGRNPNSFQFGFQFSPDSTFISCTPERLFRRRQRELFTEALAGTTTRGLNQEEDALLATQLMKDSKNSHENQLVRQHIVDVLTPLSNYVGAEETPKVFKLSHIQHLHRSIRAELKPGVDDFQLLLALHPTPAVGGLPKEPAMNFIRQREGYNRGWYAGACGYFNKYESEFAVAIRSALIEPGRINLFAGAGIVSGSEADAEWVELENKLTTILSILTEL

SEQ ID NO: 94891 - protein, 452 aa, Shewanella putrefaciens
  REGION 1..452: note = tr|A4YC96|A4YC96_SHEPC Isochorismate synthase MenF; OS = Shewanella putrefaciens (strain CN-32 / ATCC BAA-453); OX = 319224 GN=menF PE=3 SV=1
MPVHALSKDLKSLIDKLIQLKQVSPTEPIVQLSITTVSMPLISWLASQTQYPRIYWHGRDRIEEVAAIGACKDFRFETGVDDQQLAMVYQQQRALSTNQDIRYYGGVAFDRTIESWPEFGNSRFVLPRIEFRRSGTHFSLRVNLNFADNAPHTEIDNAIAAIEAVMPAKPLAPPTKLALLGRSDRPDFQRWKTLVEQVVDPKFNADTPKVVLSRLTQLEVNEPVDPWMVLACWQGRNPNSFQFGFQFSPERTFISCSPERLFRRRQQELFTEALAGTTVRGLNQEEDIALANALLEDNKNSVENQLVRSHIVNMLTPLSHYVGADELATIFKLNHIQHLHRAIRAELKAGVNDFQLLQALHPTPAVGGLPRHSAMNFIRQREGYMRGWYAGACGYFNKYESEFSVAIRCTLIEPGRINLFAGAGIIAGSDPEAEWQELENKLATIMSILIEL

SEQ ID NO: 94892 - protein, 414 aa, Shewanella sediminis
  REGION 1..414: note = tr|A8FPH0|A8FPH0_SHESH Isochorismate synthase MenF; OS = Shewanella sediminis (strain HAW-EB3) OX=425104 GN=menF; PE = 3 SV=1
MPAIAWLAAQPIYPRIYWKGRDTEEEVAAVGSCKDFAYEEAVDDNQLSLEYQKQRALSNNQDIRYYGGVAFDRTTECWPEFGRAHFVLPRIELRRSGEEYKLLINLNCESNDTETERTKAIEDLAKLVFPSPLSPPNKINLLSRSDRPDHYHWTELVKKVTHEKFIQDTPKVVLSRLTQLEVDEEVDPWTLLACWQGRNQNSFQFGFQFSPERAFISCTPERLYRRRQRELFTEALAGTTTRGLNQEEDRVLAQQLLEDSKNSHENQLVKEHIVDALTPLSNYVGAEETPRVFKLSHIQHLHRSIRAELKPGIDDFQLLQALHPTPAVGGLPKEPAMSFIRQREGYARGWYAGACGYFNKYESEFAVAIRSALIEPGRINLFAGAGIVSGSEPEAEWVELENKLTTILSILTEL

SEQ ID NO: 94893 - protein, 452 aa, Shewanella sp.
  REGION 1..452: note = tr|A0A1Z4AEX4|A0A1Z4AEX4_9GAMM Isochorismate synthase MenF OS=Shewanella sp. FDAARGOS_354 OX=1930557; GN = menF PE=3 SV=1
MPAHALSEDLKSLIDKLIQMKQVPASEPIVQLSLTTVSIPLISWLASQTQYPRIYWHGRDKIEEVAAIGACKDIKFETGVQDNELASVYERQRVLSSNPDIRYYGGVAFDRSIESWPEFGNSRFVLPRIEFRRSADQFSLRVNLNFADNNPIDEIDLAIAAIEAVMPARPLAPPNKLTLVSRQDIPDFPRWKTLVEQVVEPEFNQDTPKVVLSRLTELKVNEQVDPWMVLACWQGRNPNSFQFGFQFSPERTYISCSPERLFRRRRQQLFTEALAGTTVRGLNKEEDVALANALLEDNKNSVENQLVRRHIVNMLTPLSQYVGAEEAATIFKLNHIQHLHRAIRAELKPGVNDFQLLQALHPTPAVGGLPRESAMKFIRQREGYMRGWYAGACGYFNQDESEFSVAIRSALIEPGKINLFAGAGIIAGSDPEAEWQELENKLATIMSILIEL

SEQ ID NO: 94894 - protein, 448 aa, Shewanella violacea
  REGION 1..448: note = tr|D4ZDG9|D4ZDG9_SHEVD Isochorismate synthase MenF; OS = Shewanella violacea (strain JCM 10179 / CIP 106290 / LMG 19151 / DSS12) OX=637905 GN=menF PE=3 SV=1
MLPQAIEYLTDKLQQLNFQSHCDPIIQVSVNIKAVPVIAWLAAQPIYPRIYWKGRDTEEEVAAIGCCKDFFYDETTDDNQLAMEYQAQRALTKNQDIRYYGGVAFDRSTEAWPEFGRARFVLPRVELRRSGTEFKLVVNLNCDKQDTQSERRHAMESLGSLAPAKPLPPPNKVSLLGRSDRPDRHHWTELVNRVTDPKFIHETPKVVLSRLTQLEVNEEINPWMLLACWQGRNPSSFQFGFQFSPNRTFISCTPERLYRRRHRELFTEALAGTTTRGLNQEEDALLATQLQEDSKNSHENQLVSQHIVDVLSPLSRYVGAEESPKVFKLSHIQHLHRSIRAELKPEVDDFQLLLAMHPTPAVGGLPREAAMDFIRQQEGYARGWYAGACGYFNHYESEFAVAIRSALIEPGRINLFAGAGIVSGSEADAEWAELENKLTTILSILTEV

SEQ ID NO: 94895 - protein, 452 aa, Shewanella woodyi
  REGION 1..452: note = tr|B1KL53|B1KL53_SHEWM Isochorismate synthase MenF; OS = Shewanella woodyi (strain ATCC 51908 / MS32) OX=392500; GN = menF PE=3 SV=1
MAVYSLSQAIASLTDTLKQLKFQTQSDPIIQLSVSIKPVPAIAWLAAQPCYPRIYWKGRDTEEEVAAIGCCKDFFYADNIDDNQLSIEYQKQRALSNNQDIRYYGGVAFDRTTECWPEFGRAHFVLPRVELRRHGNDYKLLVNLNCETGNAESERDQAMTSLAQLASPKPLPPPNKINILSRSDRPDRYRWTELVNQVTHQKFIQETPKVVLSRLTQLEINQPVDPWMLLACWQGRNKNSFQFGFQFSPDSTFISCTPERLYRRRQRELFTEALAGTTTRGLNLEEDKVLAQTLMEDNKNSHENRLVKDHIVDALTPLSNYVGAESIPKVFKLSHIQHLHRSIRAELKPGVDDFQLLQALHPTPAVGGLPKEPAMSFIRQSEGYARGWYAGACGYFNKYESEFAVAIRSALIEPGRINLFAGAGIVSGSEADSEWIELENKLTTILSILTEL

SEQ ID NO: 94896 - protein, 452 aa, Shewanella xiamenensis
  REGION 1..452: note = tr|A0A1E3UXK4|A0A1E3UXK4_9GAMM Isochorismate synthase MenF OS=Shewanella xiamenensis OX=332186 GN=menF; PE = 3 SV=1
MPAHALSEDLKSLIDKLIQMKQVPASEPIVQLSLTTVSIPLISWLASQTQYPRIYWHGRDKIEEVAAIGACKDIKFETGVQDNELASVYEGQRVLSSNPDIRYYGGVAFDRSIESWPEFGNSRFVLPRIEFRRSADQFSLRVNLNFADNNPIDEIDLAIAAIEAVMPARPLAPPNKLTLVSRQDIPDFPRWKTLVEQVVEPEFNQDTPKVVLSRLTELKVNEQVDPWMVLACWQGRNPNSFQFGFQFSPERTYISCSPERLFRRRRQQLFTEALAGTTVRGLNKEEDVALANALLEDNKNSVENQLVRRHIVNMLTPLSQYVGAEEAATIFKLNHIQHLHRAIRAELKPGVNDFQLLQALHPTPAVGGLPRESAMKFIRQREGYMRGWYAGACGYFNQDESEFSVAIRSALIEPGKINLFAGAGIIAGSDPEAEWQELENKLATIMSILIEL

SEQ ID NO: 94897 - protein, 56 aa, Shigella boydii
  REGION 1..56: note = tr|I6DSK7|I6DSK7_SHIBO Isochorismate synthase entC domain protein OS=Shigella boydii 965-58 OX=766138; GN = SB96558_0857 PE=4 SV=1
MNGDSPDSPFQQKLAALFADAKAQGIKNPVMVGAIPFDPRQPSSLYIPESWQSFSR

SEQ ID NO: 94898 - protein, 431 aa, Shigella dysenteriae
  REGION 1..431: note = tr|B3X1V2|B3X1V2_9ENTR Isochorismate synthase MenF; OS = Shigella dysenteriae 1012 OX=358708 GN=menF PE=3 SV=1
MQSLTTALENLLRHLSQEIPATPGIRVIDIPFPLKDAFDALSWLASQQTYPQFYWQQRNGNEEAAVLGAITRFTSLDQAQRFLRQHPEHADLRIWGLNAFDSSQGNLLLPRLEWRRCGGKATLRLTLFSESSLQHDAIKAKEFIVTLVSIKPLPGLHLTTTREQHWPDKTGWTQLIELATKTIAEGELDKVVLARAIDLHFASPVNAAAMMAASRRLNLNCYHFYMAFDGENAFLGSSPERLWRRRDKALRTEALAGTVANHPDDKQAQQLGEWLMADDKNQRENMLVVEDICQRLQADTQTLDVLPPQVLRLRKVQHLRRCIWTSLNKADDVICLHQLQPTAAVAGLPRDLARQFIARHEPFTREWYAGSAGYLSLQQSEFCVSLRSAKISGNVVRLYAGAGIVRGSDPEQEWQEIDNKAAGLRTLLQME

SEQ ID NO: 94899 - protein, 431 aa, Shigella flexneri
  REGION 1..431: note = tr|A0A4P7TK84|A0A4P7TK84_SHIFM Isochorismate synthase MenF OS=Shigella flexneri serotype 5a (strain M90T) OX=1086030 GN=menF PE=3 SV=1
MQSLTTALENLLRHLSQEIPATPGIRVIDIPFPLKDAFDALSWLASQQTYPQFYWQQRNGDEEAAVLGAITRFTSLDQAQRFLRQHPEHADLRIWGLNAFDPSQGNLLLPRLEWRRCGGKATLRLTLFSESSLQHDAIQAKEFIATLVSIKPLPGLHLTTTREQHWPDKTGWTQLIELATKTIAEGELDKVVLARATDLHFASPVNAAAMMAASRRLNLNCYHFYMAFDGENAFLGSSPERLWRRRDKALRTEALAGTVANHPDDKQAQQLGEWLMADDKNQRENMLVVEDICQRLQADTQTLDVLPPQVLRLRKVQHLRRCIWTSLNKADDVICLHQLQPTAAVAGLPRDLARQFIARHELFTREWYAGSAGYLSLQQSEFCVSLRSAKISGNVVRLYAGAGIVRGSDPEQEWQEIDNKAAGLRTLLQME

SEQ ID NO: 94900 - protein, 431 aa, Shigella sonnei
  REGION 1..431: note = tr|A0A200LES8|A0A200LES8_SHISO Isochorismate synthase MenF OS=Shigella sonnei OX=624 GN=menF PE=3 SV=1
MQSLTTALENLLRHLSQEIPATPGIRVIDIPFPLKDAFDALSWLASQQTYPQFYWQQRNGDEEAAVLGAITRFTSLDQAQRFLRQHPEHADLRIWGLNAFDPSQGNLLLPRLEWRRCGGKATLRLTLFSESSLQHDAIQAKEFIATLVSIKPLPGLHLTTTREQHWPDKTGWTQLIELATKTIAEGELDKVVLARATDLHFASPVNAAAMMAASRRLNLNCYHFYMAFDGENAFLGSSPERLWRRRDKALRTEALAGTVANHPDDKQAQQLGEWLMADDKNQRENMLVVEDICQRLQADTQTLDVLPPQVLRLRKVQHLRRCIWTSLNKADDVICLHQLLPTAAVAGLPRDLARQFIARHEPFTREWYAGSAGYLSLQQSEFCVSLRSAKISGNVVRLYAGAGIVRGSDPEQEWQEIDNKAAGLRTLLQME

SEQ ID NO: 94901 - protein, 431 aa, Shigella sp.
  REGION 1..431: note = tr|A0A3D1C3Z1|A0A3D1C3Z1_9ENTR Isochorismate synthase MenF OS=Shigella sp. OX=625 GN=menF PE=3 SV=1
MQSLTTALENLLRHLSQEIPATPGIRVIDIPFPLKDAFDALSWLASQQTYPQFYWQQRNGDEEAAVLGAITRFTSLDQAQRFLRQHPEHADLRIWGLNAFDPSQGNLLLPRLEWRRCGGKATLRLTLFSESSLQHDAIQAKEFIATLVSIKPLPGLHLTTTREQHWPDKTGWTQLIELATKTIAEGELDKVVLARATDLHFASPVNAAAMMAASRRLNLNCYHFYMAFDGETAFLGSSPERLWRRRDKALRTEALAGTVANNPDDKQAQQLGEWLMADDKNQRENMLVVEDICQRLQADTQTLDVLPPQVLRLRKVQHLRRCIWTSLNKADDVICLHQLQPTAAVAGLPRDLARQFIARHEPFTREWYAGSAGYLSLQQSEFCVSLRSAKISGNVVRLYAGAGIVRGSDPEQEWQEIDNKAAGLRTLLQME

SEQ ID NO: 94902 - protein, 433 aa, Shimwellia blattae
  REGION 1..433: note = tr|I2B783|I2B783_SHIBC Isochorismate synthase MenF; OS = Shimwellia blattae (strain ATCC 29907 / DSM 4481 / JCM 1650 / NBRC 105725 / CDC 9005-74) OX=630626 GN=menF; PE = 3SV=1
MNSVVTALSELQQKLIAPLPDSSGTLVFTVPLTLSDDSDALQWLAAQSVWPQFYWQQRNGEQELAALGAVAHFPSLSAGEAFLAQFPASERLLICGLNQFDPASGSLFLPRLLWQRQRGQAALTLILHSEHSLAQDGLQAQALLAALLPARPLPALQLTLLREQQTPAWPRWQQLIEQALAGFSRGEMEKVVLARASDLWFSTPVSAAGFLAASRRVNLNCYHFYMAFNAQQGFIGSSPERLWRRRGVELRTEALAGTVASSADDAKAARLGEWLMHDDKNQRENMLVVEDICQRLNPIGETLEVLPPQIMRLRKVQHLRRCIWTTLRQPDDASCLRQLQPTAAVAGLPRQAASAFIQHNEPFERQWYAGSAGYISRQQAEFCVSLRSALVDGDRVRLYAGAGIVPGSDPAEEWREINNKAAGLRSLLTEKSE

SEQ ID NO: 94903 - protein, 431 aa, Simkania negevensis
  REGION 1..431: note = tr|F8L8Z2|F8L8Z2_SIMNZ Isochorismate synthase MenF; OS = Simkania negevensis (strain ATCC VR-1471 / Z) OX=331113; GN = menF PE=3 SV=1
MQKRILNLDELITKALVQTPFKPETVTLKNHTFPFMRLEIPIPGIDLLAWLEQQTLYPKIYFETPKTGFRVAGVGAAYTLDEIPSFHRLSASSRFFGGMDFYERKFETWKTFPRCRYVLPLVEIEVRHEMTYLCVNRTCEALDLSEIRFNPAPISTISQKATSRLDSPSFPVWDRNIRESLKQIQEKSLDKIVLARASLFEFEKPLSPLAFCKALQGKSPTATVFSYQFSTDQAFVGATPESLYSRTGSKVETAAIAGTRQRGKTDAEDKALQADLLENVKEMHEFNVVKEEIEKRLSPLCKALTKQNEDKIIQTSSVQHIYNLFEGELSEGIDDTSLIHALHPTPAVGGRPKEAALKEIRKWETFDRGWYAAPVGWISPEQAHILVAIRSALIHANELRLFAGTGIVPGSIPEKEWDELGHKISQFILWE

SEQ ID NO: 94904 - protein, 380 aa, unidentified
  source 1..380: note = Sinomicrobium pectinilyticum
  REGION 1..380: note = tr|A0A3N0E2J4|A0A3N0E2J4_9FLAO Isochorismate synthase OS=Sinomicrobium pectinilyticum OX=1084421; GN = ED312_17750 PE=4 SV=1
MLAAKNFFTQIKQQYDRGLPFVAYRKPVPENTVISGESGVIKALLQKDATLHVVKDFSEKGFVFSPFDQKGQTVLMPYSDTEILFSRLMGKTGDQGKGNKKEEEEIKTNSADREKHVTLVRKGVEAIRKGKLEKVVLSRNESVPISDNDPISIFQRLLELYRDAFCYIWYHPETGLWLGATPETLLHIRGCVLHTMALAGTRKFTGTTKVKWGEKEKQEQQVVTDSIVDSLRFRVKSLKISAAGTHRAGNLIHIKTDIQATLIPEYKTKNIAPLLHSLHPTPAVCGFPKEEAKRFIRENEGYDRSFYAGFLGELNVDITPGPVTDPHNRDSALYVNLRCMQIKGDSALLYIGGGITRDSVPESEWEETVHKSQTMKRVLR

SEQ ID NO: 94905 - protein, 395 aa, Skermanella stibiiresistens
  REGION 1..395: note = tr|W9H0S1|W9H0S1_9PROT Isochorismate synthase; OS = Skermanella stibiiresistens SB22 OX=1385369; GN = N825_05985 PE=4 SV=1
MRCDFDSAASASQLLGNHRAGSPFFFASPRGTLLAQGVHSRVAGPATEPGDLPQRVARTLALARKSGHSNPAVVGAIPFDPATPAQLVVARTLHSAGRLSFDRPHQAPEPAAGDCAARMVPEPAEYRRGVETALERIAGGSPAKVVLSRTLELTSDTPISVERLLYNLARHNPQGYSFAVDLPGGRTLIGASPELLVSKSGRQVVANPLAGSAARSADPVEDQRRAEALLASAKDRHEHAVVADAVAAALRPYCRWLDVPAEPSLIQTRTLWHLSTEIRGELTDYATSSLTLASALHPTPAVCGHPTAEARALIGEVETFDRGFFTGMVGWCDAIGDGEWAVTIRCAEVEGHKLRLFAGAGIVAGSTPEKELAETGAKFRTMLNGMGIRHPVETA

SEQ ID NO: 94906 - protein, 349 aa, Skermania sp.
  REGION 1..349: note = tr|A0A554V2T6|A0A554V2T6_9ACTN Isochorismate synthase OS=Skermania sp. ID1734 OX=2597516 GN=FOS14_13405; PE = 4 SV=1
MDGFLLARPHSVVRAQGRRAQFHHPADALKTDADVIVGALPFDPAAPAALFVPERWQQHAGPWRPEPATLPPVTLGAEIPSPAEHVDRVTKLIKLIGEGKLQKVVAARAVQVTATEPIRPLQLAAALNARHQRANTFAVTVDGGTLVGASPEVLVSRRGDTVQLCPLAGTAPRHADPADDRAEAEELLASSKNLAEHAFVVDWIRERLAPVCRELSVPDRPELTGTAEVWHLATPIHGVLDAPALTALELAVLLQPTPAVCGTPTELALQTIRDTEGDRGFYGGAVGWCDRAGDGDWIVAIRCATIAAGGRSATAYAGGGIVAASDPVGELDETTAKFATLLGAFGLHA

SEQ ID NO: 94907 - protein, 387 aa, unidentified
  source 1..387: note = Snodgrassella alvi
  REGION 1..387: note = tr|X2H7L0|X2H7L0_9NEIS Isochorismate synthase of siderophore biosynthesis OS=Snodgrassella alvi wkB2; OX = 1196094 GN=SALWKB2_2022 PE=4 SV=1
MTITESSAVSRSPIQSQDQFACFATSQHHISARHLIHKIHMPVNQSESCNQQIADCFNHIKAQGYANPILIAAIPFDTRKNGTLNFYSEFNQTSPAHFEHNTASAGKTANSLIRKKSLVERQAFEHSVQTALSAMADKQMQKIVLSQATEFEFARQYSPEDLLNILIRQNPDAYKFMIPVEEDQYIFGASPELLLSRQQQQVRSNPLAGSRPRSAIPEYNSQTQTELYQSAKDRHEHQLVIDNIRHKLSSYCSTYQASEIPEILTTSTMFHLSSVFQGQLKADAPDALNLALHLHPTPAVCGTPTDIARDFILNHEGYNRHYYSGLNGWMDASGNGEWVVTIRNGLLNHNIIRLYAGAGIVAGSDAAAEWFETEAKMQTMLNVFQQQ

SEQ ID NO: 94908 - protein, 400 aa, unidentified
  source 1..400: note = Solibacillus isronensis
  REGION 1..400: note = tr|K1KZA7|K1KZA7_9BACL Isochorismate synthase dhbC; OS = Solibacillus isronensis B3W22 OX=1224748 GN=dhbC PE=4; SV = 1
MVSKQKVVIEHELLDEYEVGDFFIETPKRTILGKGVYMHVPTGEPHQNQMEGLSDRVASVLKKAKEQGHLRSVVTGAVPFDYYKKACLLVPESIQIAPSLQQEERAVSGSASVTVNRLVSNPSPEHYKLGVMQGIERIRSGELDKIVLSRSLEVSLNEPIDLPQLLRNLAYQNKHGYTFAAPIEYGNQKASLIGASPELLVSRQGMYAIANPLAGSRPRSEDPVENQRREEELLSSPKDLHEHAVVVEAVVKGLRPLLKTIEVPEKPSVVYTETMMHLSTVIKGELLKADISSLDLAIALQPTPAVCGAPTEKARQAITEIEPFDRGFFTGTIGWCDAEGDGEWVVTIRCAEAKGDSLRLFAGAGVVSESKPEEELAETGAKFQTMLRAMGIDTEQLKDI

SEQ ID NO: 94909 - protein, 417 aa, Sorangium cellulosum
  REGION 1..417: note = tr|A0A4V0NDL6|A0A4V0NDL6_SORCE Isochorismate synthase OS=Sorangium cellulosum OX=56 GN=SOCEGT47_036210; PE = 4 SV=1
MTTTMFVPDAAERPASSAAQLLEQYSPESSFFFASPTCTLLAQGVREMKLEPERGDRLTGRVAALLAASEGARHPRPIVVGAVPFNNTSPARLIVPRTIQSAGPLGAAAVALRPRAPVSIRTLRMIPEPRDYVRGVEQAVSLMQTGALSKVVLSRMMELVLSRPIDLQDVLRRLAQHNRSGYTFAANLWESAAREPGPEGGPPAARPRTLIGASPELLVSRSGLQVVANPLAGSAARSPDPEEDRRRANALLTSRKDRHEHAIVVEAVAAALRPFCRRLHVPEAPSLTHTATMWHLATRVTGELDDLSISSMKLAMALHPTPAVCGYPAERARAAIESLEPFDRGFFTGLVGWCDAAGDGEWAVAIRCADIAGRSARLYAGAGLVVGSDGDMELAETSAKLRTMVNALGLELAPEMA

SEQ ID NO: 94910 - protein, 409 aa, Sphaerisporangium album
  REGION 1..409: note = tr|A0A367FA72|A0A367FA72_9ACTN Isochorismate synthase OS=Sphaerisporangium album OX=509200; GN = DQ384_28485 PE=4 SV=1
MSVALGITRPPLVRSVPVHHAEDLIARLPQAPPYAWVHQGEGLVAWGEAARVSVPPGAGRFDWARRWLAEVFGEAHIDDDVHVPGSGPVAFGSFTFDPDAAGSVLVVPRVVLGRRNGRAWLTTVGEPPIDLVAPAVPPGRVVYGDGSLSAPGWQHAVARAVKDIRAGRLEKVVLARDLLATAEREIDPRVLLERLARAYPDCYTFSCAGLVGATPELLVRHTGESIESLVLAGTTYRGATPAGDRAQAAALFASAKDRHEHACAVASVRDALTPLCASLSVPEEPELLVLPNVQHLASRVRGRLADGASVLDVVAAMHPTAAVGGTPTPVALEVIRELEGMDRAGYAGPVGWIDARGDGEWGIALRCAYVEGRRARLFAGCGIMGGSDPEAELAEAQAKFRVMRYALEG

SEQ ID NO: 94911 - protein, 386 aa, Sphaerisporangium sp.
  REGION 1..386: note = tr|A0A366LQ91|A0A366LQ91_9ACTN Isochorismate synthase OS=Sphaerisporangium sp. LHW63015 OX=2248750; GN = DP939_32695 PE=4 SV=1
MTISYEPVTASELLGEYRPGRSSLFSSPQHTLLAQGVGDVVGPAGTLRALEEQVRDAGRLVLGAVPFDDPASAHLVMPERVRWADPFIARPVAPDVPPRPWRITPVPGPDAHLAGVRRALRLLDQGRLDKVVLARSLELSHPDPPDVTTMVERLAARDPDGHIFAVPLPGRRTLVGASPELLVSRSGPIVVAGPMAGSAARSADPAEDRRRAAALLCSAKDQREHALVTQAVADALAPFCRALSVPDEPSLSCTSTMWHLSSRITGRLADPETTALGLAVAMHPTPAVCGTPTADARAAIAEIEPFDRGFYTGMVGWCDASGDGEWAVTIRCAELSQDGIRLFAGGGIVPGSVPEDELAETTAKFRTLMDALGLDERAALAVSAGE

SEQ ID NO: 94912 - protein, 472 aa, Sphaerobacter thermophilus
  REGION 1..472: note = tr|D1C9D4|D1C9D4_SPHTD Isochorismate synthase; OS = Sphaerobacter thermophilus (strain DSM 20745 / S 6022); OX = 479434 GN=Sthe_3025 PE=4 SV=1
MTERIDTEQVLAPLLARARRLAAERGAPVLVSWSERVAAEDPIDVFAQAATASDRCLWLQPDADFALVGVGAAHVIEPTGPERFAAADAAWRALLDGALIVGDGPGPTVIGGFAFDPERPSTPRWCGFPDARLILPRQTLTLQGGECWRRVNVVVGDRHPSPPTPLPTLGEGSIEHDGMPSTQSAPDSPSPNVGRGGQGVRAVPRFLTAVAQAAAAVRRGDLEKVVLAREVRVEAEEPFDVEAALRRLRDAYPSCYVFAVARGERVFLGATPERLVRLDGRTVRVASLAGSIPRGATPEEDRELAAALLASAKDRAEHAVVVRAIRTALDGPCVEVETPDEPEILSVRNVHHLYTPVTARLRDGATLMDLVARLHPTPAVGGTPRAEALRYIREHEGLDRGWYAAPVGWMDASGQGEFAVALRSALVEGAEASLFAGCGIMGDSDPEREYAESSVKLRPMLAALGIEGAETE

SEQ ID NO: 94913 - protein, 445 aa, Spirosoma sp.
  REGION 1..445: note = tr|A0A515AAE5|A0A515AAE5_9BACT Isochorismate synthase OS=Spirosoma sp. KCTC 42546 OX=2520506; GN = EXU85_22200 PE=4 SV=1
MQPEYKVDSSSTSQLAETQRTAQPNASDIWETALTLGLPAALWRLPNNQDKHLIVSFDEILPRVSADLDELPAGFLVSPFDNLAKDAPVEALLAEHLDTTGSVPQTLFLRADIQAIFPESGPSSVKQNEHTTASVETTDQFWHELSVRSTHKTSRKTTSESPTPVLDPTIGVVYERNVKEAVESIKRGELRKVVLARTKQVLFTDAPNAIELFDKLCQKYPTAFVSAVSIPERGQIWMSATPERLVSMSADGIFQTASLAGTQSAFHPDGTAKQPSKAMWSQKEIEEQAIVSRYIIECFKKIRLREYIEEGPKTIIAGNLMHLGTSYTVDTQAVRYPQLGTVMLRLLHPTSAVCGTPRNAAFTFIRQHEPHDRELYSGFLGPVNINANNEGPTSSIFVHIRCMKLEGKLATLYAGAGITEDSEPEQEWQETEMKCQTLLKVMYNE

SEQ ID NO: 94914 - protein, 276 aa, Sporolactobacillus inulinus
  REGION 1..276: note = tr|A0A4Y1ZA50|A0A4Y1ZA50_9BACL Isochorismate synthase OS=Sporolactobacillus inulinus OX=2078; GN = NBRC111894_1345 PE=4 SV=1
MIYLIGNVTSLSETVHAAIDHARRSHQSCVVSKIEELNRILPLDFYQRAGRSYSGQRCYWSDSSGELQLVGAGITAMIATQSEDAAVQVRQAQARLFRNAYTVGAQHVAGTGAVFLGGFAFDSKKERSAMWQEFGSAYFILPEFLLTVHRGHCYFTHTILCRPNDDAAERVGALEAQPNELFDNGFHAATDTHDQQLLDQKDLDQDTWCRLVAKAVQTMQETPMKKIVLARARSLIFQRQLSSHALLRVLSEEQKGTCIFAWKRVRQHLSGQRRND

SEQ ID NO: 94915 - protein, 473 aa, unidentified
  source 1..473: note = Sporolactobacillus shoreae
  REGION 1..473: note = tr|A0A4Z0GJK4|A0A4Z0GJK4_9BACL Isochorismate synthase OS=Sporolactobacillus shoreae OX=1465501; GN = E4665_16675 PE=4 SV=1
MTMDTRIDEYGVPDRLIHKNETANRKILVSLVKKINWIDPVAFYQAGNEDFVGKRFYWQGQSGDFKMAGLGITEKIKIEGAADRIQKVRDSWSKILKNMVRTGVTDQEGSGPILFGGFSFDPNGRTTGLWKNFDSGLFYLPTFLLTVSRGQAYLTVNAFHFSGESLETSVSKMEEKADEILTKCQLVDYSTPKTEWLNIKKQDSEKWIELVNWAVKDLKAGVIDKVVLARTLELISDHRPDIGGVLHRLQAHQKGNFIFSLEVENDCFIGATPERLVRKQNNRLFSACLAGSIGRGRDPQEDDKLGRELMHDRKNRLEHNYVVSTVKNELKMVCEHLNIPDQPILMKNKHIQHLYTPVEGTCAAGVSIFDIVAGLHPTPALGGLPRNVAIKWIRENEPFERGLYASPIGWSDSNGNGEFAVGIRSALVSGKTTTLFAGCGVVRESIPEKEYEETAIKFRPMLDGLEVADNGSR

SEQ ID NO: 94916 - protein, 467 aa, Sporolactobacillus sp.
  REGION 1..467: note = tr|A0A4Q4IHB6|A0A4Q4IHB6_9BACL Isochorismate synthase OS=Sporolactobacillus sp. THM19-2 OX=2511171; GN = EWH91_08040 PE=4 SV=1
MVSQVVDHAQVIRQPGNDDSRLVSLTRKIQSADPIAFYQSGEGMFQGKRFYWENPSGQLIMAGLGFVENIHITGEAQRFQRIRDNWSDIVSGVNRIGVTGIEATGPVLFGGFSFESEDNGMNLWQAFGNGCFYLPEFLLTVVEGCSYLTLNVCCPKSGSPDAVLTEKERLVADLLRKKASHSPSSGPFYPDHIEKQDMAAWSFMVNKALQNIMTGSIDKVVLARTVQLHYDQKPKSERVLNRLRKEQCGNYIFCQESGQDYFIGATPERLIRKEGDKLYSTCLAGSAARGKNAEEDRELGRKLLHDQKNRKEHQYVVSMIREVFQNLCSSVAIPEKPILLKNRDVQHLYTPACGRCRRDVSLFDLVSRLHPTPALGGLPRTAAVQWIRENETERRGLYGSPIGWCDAEGNGEFAVGIRSGLVKPKKAILYAGCGIVKDSVPETEYRETQMKFRPMMSGLGVSSFGTC

SEQ ID NO: 94917 - protein, 993 aa, Sporomusa sp.
  REGION 1..993: note = tr|A0A0U1L2H4|A0A0U1L2H4_9FIRM 2,3-dihydroxybenzoate-AMP ligase of siderophore biosynthesis / Isochorismate synthase of siderophore biosynthesis OS=Sporomusa sp. An4OX=411922; GN = SpAn4DRAFT_0343 PE=4 SV=1
MKADKEWFDNAAIKYEQLGYWEKLTLGQQLKLWAEKYQNRIALVEDDTRLTYKELDHKVDELAAGFFTMGIKKGDNVVVQLPNRISFVITCFALFRIGAVPVLSLPAHRETELDGIFTLAKPVAYIIPVTFLGFDYKKMADQLVKKHPAVKFIITDGKSENSINLADISMPPVDLEGPSYRDTALLLLSGGTTDTPKLIPRTHTDYAYNAKATAERCKLNLQSAYLAVLPIAHNFPLCCPGVLGTLSVGGKVVLCKTTSSDEAFPLIEKERVTITALVPAMVNLLLEVLEWDNSNDISSLEVLQVGGSMLDENLAKRIMPEMQCRLQQVFGMAEGLICCTAIDDPDHIIHSCQGWPISEGDEIRIVDEDGNDVVQGQYGELLVRGPYTIRGYYRAPEQNRKDFTSDGFYRSGDKARITPEGNIQIGGRIKEQINRAGEKIMPAEIESYLCSHPAIRNAALIGLPDDNLGERSCAYLITDNREINLTDIHKFLHDLGVARYKMPDQIELIDCWPLTSVGKVDKTKLKAMAAGPDRKAEDYPTSYFEEAIDFAGDAHLTAAQIIESGICETYLLYENKEELSLGMGVHTLVSVDSEYTTLKTDNESLQLENELLSETIARAFSAVRLKNWRAYGTANFGLARYHHKLPLLSEDNCLLKLFIPEVEVRFTPNSILLRALDNERFKELGKLVRAILQMGHNRSSVKSLAARVDGRKLEVPWVNTHNADGYMKIVAEAVQEIRGRKYQKVILSRKIPLDQELDMVASYITGRKVNSPARSFLLCFGGLHAAGFSPETVVEVDSQGWVSTQPLAGTRARGGSEEEESRLKDELLNDPKEIAEHAVSVKLAFEEMQSICDSESIAVSDFMSIANRGTVQHIASRLKGKLKPDCNSWHAFNALFPAITASGIPKKESIDAIGRLEAHPRNLYSGCVMTFDSDGVMDAALVLRTIFQKDKSAWLHTGAGIVEMSIPSRELEETREKLSSYSRQLVVSSRAIG

SEQ ID NO: 94918 - protein, 383 aa, Sporomusa termitida
  REGION 1..383: note = tr|A0A517DRC3|A0A517DRC3_9FIRM Isochorismate synthase MenF OS=Sporomusa termitida OX=2377 GN=menF PE=4; SV = 1
MQYKAKQIKLDNPLSFWKHFVNEERMLFYNPLKKECILGAKRLKILPRQNGYTDYPYIFSAMTFFGTVKDEKWAGFGNESIAFQYYLVEKDGRQTLHYHGDPIKIENQEMKKYRHAYHYQEDDYEDWSQLFTSLTAAIAAKEVNKVVISREVRIECDRVIHIESVLQNLLQKNQNSNSFIFAYFKDGKTFLGATPEILVQKEQDNILSYALAGTISRDSQNDEVQKAILLRDAKNRYEHQIVIDTIAAGIKKFTGAVQVGDTSVLTLRNVHHLQTPIYAKDQRGTLLEWAARLHPTPALGGNPVHRALALLRRYEKHERGLYAAPLGITDAKGDGVFVAGIRSALIQGNLAFAYTGCGLVAKSESRAEYLETNDKLRTIVESL

SEQ ID NO: 94919 - protein, 468 aa, Sporosarcina globispora
  REGION 1..468: note = tr|A0A0M0GA48|A0A0M0GA48_SPOGL Isochorismate synthase MenF OS=Sporosarcina globispora OX=1459 GN=menF; PE = 3 SV=1
MVTIQDTELKEGIQEAIERAKALSKPVLVSEVQKINHIDPLSFYAAGKSRFFGERFFWKDPSSEAYIIGLGICKQIQSDQSTGRFNRVEKEWKRFINNSIIFNPYDKNATGPVMFGGFSFDPLKQKTKLWSKYSDSLFHVPTYMYSEMNGQAYLTTNVVCTQHDGESLFEKIVAERGMLIASIKGYHPESSNPLREEADINPEKWMNTVDSVVDELKSGPLKKVVLARESRLKYEKPIEIERVLSNLMELQRESFIFAFESNGDCFIGASPERLIKKYGENVFTTCLAGSIPRGKTEEDDHILGEALLHDQKNLTEHQYVVDMIKEAMEESCSEVELPDKPQLMKMRDIQHLYTPVIGKTKGEASLLALVDRLHPTPALGGLPKRAAVEKIREVEELDRGFYAAPLGWMDFRGNGEYAVAIRSGLIQGNEASLFAGCGVVQDSNAESEYQETKIKFRPMLTALGGYEK

SEQ ID NO: 94920 - protein, 458 aa, Sporosarcina newyorkensis
  REGION 1..458: note = tr|F9DWW8|F9DWW8_9BACL Menaquinone-specific isochorismate synthase OS=Sporosarcina newyorkensis 2681; OX = 1027292 GN=menF PE=4 SV=1
MNRKLTDRANLGQTVGTEARFFTETIEVETLDPLAFFEAGRLHYGDHRFFWQNADKTVKLVGVGQAAVLTADTHRFQSISRQWKALCERLIKEEKDMDPVLFGGFSFDPQTRQDEEWTAFPAAYFTVPLIQLKIDNGKTYVSINYVTDELEAAAQFEGLRQERDRLIHIAQVDEFTLQGKPAIVSQTELATDRYMEAVENVTSQIKAQLAEKVVIARKIKLSFEEEFQKATALHAITNEQQASYHFGLQIGEEMFFGATPERLVEISKGQAYSACVAGSIHRGKTALEDQQLGEQLLRDKKNREEHQYVVDMITEVFSEFCSSLHVNKTPKLLKVRDIQHLFTPVEGKLAEDQDIFRLVEALHPTPALGGVPRKKALAIIRDEEQMDRGFYAGPIGWTDAAGNGEFAVAIRSGLLSGKDAYLYAGGGIVADSMPTEEYKETWVKFRPVLRALGGSLHE

SEQ ID NO: 94921 - protein, 462 aa, Sporosarcina pasteurii
  REGION 1..462: note = tr|A0A380CAD6|A0A380CAD6_SPOPA Isochorismate synthase dhbC OS=Sporosarcina pasteurii OX=1474 GN=dhbC; PE = 4 SV=1
MSQKITIPWLEQPVTEETHLRFFTETIEVGRISPLAFLEAGQTRYSEEHFYWQNANQTLTIVGLGHAEVLQSNCVEERFSDIKKRWREICDGLIKEEKDKAPVLFGGFSFDPKNARESEWAKFPSAYFVLPSFQLMTKNGRTYILINLVTTNYHAAEEFEKLRVERDQLIHKAQLNGFVPASKPTVESVDEIEKERYKQAVQNVTSQIQKGEADKVVVARSVKLNFKEPVSSVTALHHIANEQQESYHFGLQKGEQLFFGATPERLIEIEDGQAYSACVAGSIKRGETAEEDRLLGEELLTDRKNRDEHQYVVDMISTVFNEFCTNNSIPQEPKLMKIRDIQHLFTPVQASVDKEKSIFEFVQALHPTPALGGVPTNKSMDIIREEEQMDRGYYAAPIGWTDTEGNGEFAVAIRSALLEEEQAYLYAGGGIVANSEVEKEYDETWIKFRPVLRALGGKLYDK

SEQ ID NO: 94922 - protein, 404 aa, Sporosarcina sp.
  REGION 1..404: note = tr|A0A2G5ZIY3|A0A2G5ZIY3_9BACL Isochorismate synthase OS=Sporosarcina sp. P29 OX=2048252 GN=CSV68_00255; PE = 4 SV=1
MSKVSMSKVKSILDEYESGDFFLSSSKQTIMGKGVFSVVKETWKTKNQICSLPDRVEEAIEQAKRAGHPHPIVVGAVPFDYSEASKMIIPEEVKVSTALVKDSVQLENIPLQPYEIQHIPEPAEYMKCVNQGLDKISSGQIDKIVVSRALNFKTKEQIDVKQILKRLEHHNKQGYTFAVDISDVNTISNKETVSTNGKRILIGASPELLVSKNDSILFANPLAGSRPRCDDPIEDQRRALELLESEKDLYEHAVVVNMVKESLAPFCESMDVPEIPSLIKTEAMWHLSTEIYGTLKQAQTSSLELGMALHPTPAVCGHPTELAREAIYEIEPFNRGFFAGMVGWCDENGNGEWIVTIRCAEVEENDIRLFAGAGVVAGSIPEEELNETGAKFKTMLDAMGIEKL

SEQ ID NO: 94923 - protein, 480 aa, unidentified
  source 1..480: note = Stanieria cyanosphaera
  REGION 1..480: note = tr|K9XV14|K9XV14_STAC7 Isochorismate synthase; OS = Stanieria cyanosphaera (strain ATCC 29371 / PCC 7437); OX = 111780 GN=Sta7437_2363 PE=4 SV=1
MTQSRISMPVVSELDLIFQDHLKLDNFWDQQQLVSEPNEPKKIISFVQRIPTIDPLAFLQNFNHSNSLHFYWENPRKQEAVIACGVTQKLLIDSRDRFKIAQNFIQKCLKKTVRKGETSITGAGPHLFCTFTFFPDADKSYSPFPAATVFLPRLQLIKKNKSCLLIVNVPVNYADNSKLIVEEIKQKINSIDWSLQQKLNSEINECFASNYNSISEDSEYFKSVVTSALNSIAIDEFSKIVLAYATDVVSPVPFRLIKSLDNLRQRHPDCYIFSTSNGRDNNFIGASPERLVSIQNKQLVTDALAGSAPRGKTTAEDVQLANLLLKNRKEKREHQAVSDFLIERLRQLDLKPQQLPLQLLQLSNIQHLWTPIYAHLSHDLDPLEIVAQLHPTPAVAGVSTEIACEQIRRYEKFDRSLYAAPLGWVDYQGNSEFIVGIRSALIEGNRARLYAGAGIVSGSNPEKEFAEIQLKLQSLLKALV

SEQ ID NO: 94924 - protein, 403 aa, unidentified
  source 1..403: note = Staphylococcus argenteus
  REGION 1..403: note = tr|A0A5B8LCI6|A0A5B8LCI6_9STAP Isochorismate synthase OS=Staphylococcus argenteus OX=985002; GN = FPV14_05890 PE=4 SV=1
MRLNDNQTSYFGYKAIQLFKNNFKNKQSIFREWEKLKHEMAFIHPQSGRHHLRIVGGFQFSSHKSDDEWREFGLNHFVLPEVLITTEDEDTFLTYTVQRENFDMDSFKALVEFFNNAIEIDVEDQNGEIIRNEDIYKDDWRQLVEEAIESINKEEKIVLARRRLIKFDKDISIPYILKQAFSKEKNSYIFLLESQDSIFFSQTPEQLLKVNNRILSTKAVAGTIKRSHNEEEDKKHVEAFLKDNKNLVEHRFVVESILHDIEPYITELDYDKTPKILKNDHLYHLYTEIKAPLKDDSYIGLIDNLHPTPALGGYPKAFAIDFIEQKEFGTRGLYGAPVGYIDIYDDCEFIVAIRSMLIKKTQATLFAGCGIVKDSDPDSELAETNLKFSPMMNALGVDMNGKS

SEQ ID NO: 94925 - protein, 450 aa, Staphylococcus arlettae
  REGION 1..450: note = tr|A0A380CIY5|A0A380CIY5_9STAP Menaquinone-specific isochorismate synthase OS=Staphylococcus arlettae OX=29378; GN = dhbC PE=4 SV=1
MTVDVKEDKIVSAVYDSSRTWVSVEAKIDYELDPTMLFQITEDSADDRFFFKKNDNTMSFFGYRAINRFKNDFENKQSIFREWEKYKNDIELIHPNSDKHHLKICGGFQFSSHKSGDEWRQFGINHFILPEVLVTMTEGSTYITYTTKRATFELAKFNAVIQHLTQNTTVIHDDLGKVKRIEDIYKEEWRDLVRDTIAQLNENNKIVLARKRMIQFEKQIKIPFILNQAMQSERNSYLFVLESEDSIFFSQTPEQLMEVKNDVIYTKAVAGTIKRTHDEAEDLRNIEQFLQDTKNLNEHQFVVDSILNDIKPYVNEVNYNESPKILTNDHLYHLLTEINGTLTNESYIGLIDHLHPTPALGGFPKDEAVSYIEKNEFGTRGLYGAPVGFIDMYDDCEFIVAIRSMLIKNQQATLFAGCGIVHDSDPDSEVEETAVKFTPMMRALGVDGND

SEQ ID NO: 94926 - protein, 403 aa, Staphylococcus aureus
  REGION 1..403: note = tr|A0A4P7P4N6|A0A4P7P4N6_STAAU Isochorismate synthase OS=Staphylococcus aureus subsp. aureus OX=46170; GN = E5491_05045 PE=4 SV=1
MRLNDNRTSYFGYKAIQLFKNNSKNKQSIFKDWEKLKHNITFIHPQSEKHHLRVVGGFQFSSHKSDDEWREFGLNHFVLPEVLISTDNNGTFLTYTVKRESFTVEALNDLMDLFNNISDIDVDEQIGEITRNEDIYKDDWRQLVVEAIESINNEEKIVLARRRLIKFDKDISIPYILKQAYSKEKNSYIFLLESQDSIFFSQTPEQLIKVNNKILSTKAVAGTIKRSQDEDEDTKNVEAFLKDNKNLIEHRFVVDSILHDIKPYITELHYDKTPKILKNDHLYHLYTEIKAPLKDDSYISLIDHLHPTPALGGYPKEFAMDFIEQKEFGTRGLYGAPVGYIDIYDDCEFIVAIRSMLIKKAQATLFAGCGIVKDSDPDSELAETNLKFTPMMNALGVDMNGKS

SEQ ID NO: 94927 - protein, 252 aa, Staphylococcus auricularis
  REGION 1..252: note = tr|A0A2X5AUX2|A0A2X5AUX2_9STAP Isochorismate synthase OS=Staphylococcus auricularis OX=29379 GN=entC; PE = 4 SV=1
MKVKKIVLARRRLYLFEKPIYIPIILQRALQNEFNSYIFILESGDSIFFSQTPEQLMEVNDNVLSTKAVAGTIKRTHDEAKDQANVNAFLEDEKNLNEHRFVVKSILNDIEDYVEDVDYNDSPDILKNDSMYHLYTEIKALLKDGSYIGLLDHLHPTPALGGYPKDEAVDYIEQNEFGTRGLYGSPVGFIDIYNNCEFIVAIRSMLIKGNQATLFAGCGIVSDSVADSEVAETAVKFTPMMRALGVEDHDNN

SEQ ID NO: 94928 - protein, 456 aa, Staphylococcus capitis
  REGION 1..456: note = tr|A0A4U9TJ54|A0A4U9TJ54_STACP Isochorismate synthase OS=Staphylococcus capitis OX=29388 GN=dhbC PE=4; SV = 1
MKRMAVNVKEEDIVDKLYASTKDWVSVETELNRTIDPSTLFHLTEQDAGDRFYMRLNDNHSSYFGYHEVQRFKNNFENKQSIFREWEKLKNEIELIHPNTSQHHLRLCGGFQFSSHKSDDEWREYGLNHFVLPKVLISIEGDRTFITYTTERQDFNIETFKEVVSYFENTEVNETEDSLGDVTRVEDIYKDDWRELVEEAIDTIDETKKIVLARRRLIKFDKDINIPYVLNQALKNEKNSYMFLLESNQSIFFSQTPEQLIKVQDGVLSTKAVAGTIKRSHNEVEDEANIKAFLKDKKNLGEHQFVVESILNDIKPFVQDVEYNETPNILKNDHLYHLYTEIKGHLNDKSYIGLIDCLHPTPALGGYPKDEALEFIENKEFGTRGLYGSPVGYIDVYDDCEFIVAIRSMLIKGDQATLFAGCGIVKNSDPDSEVAETAVKFSPMMNALGVDNYDKS

SEQ ID NO: 94929 - protein, 453 aa, Staphylococcus caprae
  REGION 1..453: note = tr|C5QR49|C5QR49_9STAP Isochorismate synthase; OS = Staphylococcus caprae M23864:W1 OX=525378 GN=menF PE=4; SV = 1
MAVNVKEEDIVDKLYASTKDWVSVEVEIDRTIEPSALFRLTEQEAGDRFYMRLNDNYSSYFGYHAVQRFKNNFENKQSIFREWEKLKYEIELIHPDTSRHHLRLCGGFQFSSHKSDDEWREYGLNHFVLPKVLISNEGERTFITYTTERQDFDIEAFKQLVSYFEHTKVDSSETERGNVTRMEDIYKDDWRELVEESIEKIDESKKIVLARRRLIKFDKEIDIPYVLNRALQNEKNSYIFLLESNQSIFFSQTPEQLIKVEDGILSTKAVAGTIKRSHNEAEDEENIKAFLKDKKNLGEHQFVVESILNDIKPFVQDIDYNETPNILKNDHLYHLYTEIKGHLNDKSYIGLIDCLHPTPALGGYPKAEALEFIENNEFGTRGLYGSPVGYIDVYDDCEFIVAIRSMLIKGDQATLFAGCGIVKNSDPDSEVAETAVKFSPMMNALGVDNYDES

SEQ ID NO: 94930 - protein, 455 aa, Staphylococcus carnosus
  REGION 1..455: note = tr|A0A3S0MPI1|A0A3S0MPI1_STACA Isochorismate synthase OS=Staphylococcus carnosus subsp. carnosus; OX = 147448 GN=CD154_04705 PE=4 SV=1
MAANLKEDEIIESIYESNKNWISVEVILNRTLPPTALFQLTEDQAGDRFYLRLNDNQSSFFGYHAVQRFKNNFENKQSIFREWEKFKKDVELIHLETSKHHLKVVGGFQFSSHKSDDEWREFGINHFVVPKVLITNVDNQTLLTYTVERENFDIDQFKEIIDYFENAEIHEPDVNDAMGNITRMEDIYKDEWKELVSDAIAQLDEDKKIVLARRRLIKFDKTISVPYVLKRALENEKNSYIFILESNQSVFFSQTPEQLLKVDEGVLSTKAVAGTIKRTHNENVDQQNVKAFLEDKKNLGEHQFVVRSILHDIESFVDDVEYNQTPNILKNDHMYHLYTEIKGKLKSNSYIGLIDELHPTPALGGYPKDEAVKFIEENEFGTRGLYGAPVGFIDMDDDCEFIVAIRSMLIKEKQTTLFAGCGIVKDSDPESELAETAVKFSPMMNALGVVDKNES

SEQ ID NO: 94931 - protein, 450 aa, Staphylococcus chromogenes
  REGION 1..450: note = tr|A0A4U0DGP8|A0A4U0DGP8_STACR Isochorismate synthase OS=Staphylococcus chromogenes OX=46126; GN = FCF12_06130 PE=4 SV=1
MTVDVGEQEIIDAIAHTSKTWVSIEVRLSRTLDPVTLFKKTNQEAGNRFYFRLNDNETAYFGCRVAKEFKNNKQNKRSIFEEWNQFKNDIALIHPQSERHHLRICGGFQFSTKRTSVEWHQFGMNHFILPEILVSHVKGETYLTYTVPVEQFHYETFKEWETFFNTLNDDNASVTPEEQQVCRQMDLDVEEWEQLVANTIRQLDTDEKVVLSRRRAIEFNTSIDIALVLEKALKNEKNSYLFVLESGEDCFISQTPEQLFKVQEGMLSTKAVAGTIKRTPNPQQDKTRVHAFLQDDKNLGEHHIVVESILEDIKPFVKNVNYNKTPSILKNDHLYHLYTEISGTLATSNYIELIDVMHPTPALGGYPKAQAMTYIDAHEFNARGLYGAPVGMIDMYDDSEFIVAIRSMLIQGNQALLFAGAGIVKDSDAKAEVAETALKFSPMMDALGVN

SEQ ID NO: 94932 - protein, 450 aa, Staphylococcus cohnii
  REGION 1..450: note = tr|A0A3N0HTC1|A0A3N0HTC1_9STAP Isochorismate synthase OS=Staphylococcus cohnii OX=29382 GN=EFY80_03875; PE = 4 SV=1
MTLDVKESEIVEAVYESNHTWVSVEAKLDYELEPSLLFHLTEDCAGDRFYFKKNDNETSFFGYHAITRFKNDFENKQSIFREWEKYKNDIELIHPNSERHHLKICGGFQFSTHKSGDEWREFGINHFVLPEVLVTMEQGQSFITYTVEADKFEIDTFLAIIDRLTQKDVQPSDEIGDIKRIDDIYKDEWRELVKDTIDILDENKKIVLARKRLIMFDKNINIPYILNRAMQGEHNSYLFVLESQDSVFFSQTPEQLMEVKDDVLSTKAVAGTIKRTHRDDIDKANIDAFLNDDKNLNEHHFVVKSILNDIKPYVEEITFNKKPQILTNDHLYHLYTKIEGRLLQNSYIGLLDNLHPTPALGGYPKEEAISYIENNEFGTRGLYGAPVGYIDMYDNCEFIVAIRSMLIKKNQATLFAGCGIVQNSDADSEVEETAVKFNPMMKALGVEKYE

SEQ ID NO: 94933 - protein, 450 aa, Staphylococcus condimenti
  REGION 1..450: note = tr|A0A143PA84|A0A143PA84_9STAP Isochorismate synthase OS=Staphylococcus condimenti OX=70255 GN=menF; PE = 4 SV=1
MTVSVKDDQILDAIYENSESWVSVEIKIDQPTNPIMLFQMTEGQAQDRFYFKDNSGKTAFFGYDALLKLKNNHENKQSIFREWEKYKENIALIHPDTPKHHLKVCGGFQFSSHKSDDEWRQFGLNHFVLPKVLITMEKNETILTYTVPRETFDIEDLKALANKIASTEVQPTHANGDIKRSEDIYKDEWLNIVREAIDTMNEDEKIVLARRRMIQFKKDIDIAYVLENALKNESNSYIFVMESDQSIFFSQTPEQLMEVENNVLSTKAVAGTIKRTNDEAEDKKHLNAFLQDEKNLHEHRFVVQSILDDIEPYVGDVEYNKHPKILKNDHLYHLYTEISGELKDKTYIGLLDRLHPTPALGGFPKEKAVDFIEQKEFGTRGLYGSPVGYIDMDDNCQFIVAIRSMLIKKNQATLFAGCGIIKQSEPESELAETTLKFTPMMNALGVENHG

SEQ ID NO: 94934 - protein, 452 aa, Staphylococcus delphini
  REGION 1..452: note = tr|A0A447YZU8|A0A447YZU8_9STAP Isochorismate synthase OS=Staphylococcus delphini OX=53344 GN=menF PE=4; SV = 1
MSVDVCEQAIIDAVQQTKQQWVSVEVKLEQQLDPITLFDMSKEDAGDRFYFRLNDNETSFFGYRVAAKIKNDFTNKRSIFKEWEKFKDDIALIHPDSERHHLRICGGFQFSTKRMGDEWRRFGVNHFILPEVLISQVNQETFLTYTVQKEAFSIEQLYELVEKLNHLPRVVVQNTTPPQIKRIEDIYKDEWEALVEETTAKLAHDEKVVLSRRRMVQFDADIEIGAVLYRALKNEKNSYLFALESEDDIFISQTPEQLFKVTNGMLSTKAVAGTIPRTHNEAQDQARINALLKNEKNLIEHGIVVESILEDIRPFIQYADYNREPQVLKNDHLYHLYTEIGGPLAHKSYIELIDDLHPTPALGGYPKARALEYIEMHEFGARGLYGAPVGMIDMYDDCEFIVAIRSMLMNHQQALLFAGAGIVKDSDAAEEVAETELKYKPMMVALGVSEHD

SEQ ID NO: 94935 - protein, 455 aa, Staphylococcus devriesei
  REGION 1..455: note = tr|A0A2K4DLK6|A0A2K4DLK6_9STAP Isochorismate synthase OS=Staphylococcus devriesei OX=586733 GN=entC; PE = 4 SV=1
MAANLKEGEIIESIYESNKSWVSVEVVLDKTLTPDALFHLTEDQAGDRFYFRLNDNTSSFFGYHAVQKFKNNFENKQSIFREWEKFKNEVELIHLETKKHHLKVIGGFQFSSHKSDDEWREFGINHFVVPEVLISSIDNQTLLTYTVERANFDMEHFKDVIAHFENADVDDSDHEETLGNITRMEDIYKDEWKELVGNAIEQLDENKKIVLARRRMIKFDKPIDIPYVLNRALQNEKNSYLFILESNESVFFSQTPEQLLKVEDGVLSTKAVAGTIQRSHNEEEDRKNIEAFLQDKKNLGEHDFVVRSILHDIEPYVEGVDYNQTPNILKNDHMYHLYTKIQGKLKSNSYIGLIDQMHPTPALGGYPKEEAVKFIEEHEFGTRGLYGAPVGYIDMNDDCEFIVAIRSMLIKQNQTTLFAGCGIVKDSDPESEVVETAVKFSPMMNALGVVDKNES

SEQ ID NO: 94936 - protein, 456 aa, Staphylococcus epidermidis
  REGION 1..456: note = tr|D4FK37|D4FK37_STAEP Isochorismate synthase; OS = Staphylococcus epidermidis M23864:W2(grey) OX=525375; GN = HMPREF0794_0925 PE=4 SV=1
MKKMDVNVDEQAIVDKLYESTKDWVSVEVELNKTMKPSVLFHLTEKDAGDRFYMRLNDNYSSYFGYHAIHRFKNDFENKQSIFKDWEKLKNNIELIHPHNKYHHLRLCGGFQFSSHKSDDEWREYGLNHFVLPKVLISNEGTRTYLTYTTKRQDFDLQAFKTLVAHFEQTTMDNPEEALGDVTRMEDIYKDDWRDLVKEAIDTIDDNKKIVLARRRLVKFDKKINIPYVLNRALENEKNSYIFLLEANQSIFFSQTPEQLIKVEDGVLSTKAVAGTIKRTHNEQIDNKNIEAFLKDKKNLGEHRFVVESILNDIEPFVQDVEYNETPNILKNDHMYHLYTEIKANLNDKSYIGLIDRLHPTPALGGYPKEEALDFIENKEFGTRGLYGAPVGYIDVYDDCEFIVAIRSMLIKEQQATLYAGCGIVKNSDPDSEVAETAVKFSPMMNALGVDNNDES

SEQ ID NO: 94937 - protein, 451 aa, Staphylococcus equorum
  REGION 1..451: note = tr|A0A431ZUS8|A0A431ZUS8_9STAP Isochorismate synthase OS=Staphylococcus equorum subsp. equorum OX=29383; GN = CD145_11495 PE=4 SV=1
MDVNVKEDDIVDKIYESTKDWVSVEIKVDKSFEPSTLFHLTEQNAGDRFYMRLNDNYSSYFGYHAVQRFKNDFENKQSIFKDWEKLKDNIELIHPDSDYHHLRLCGGFQFSGHKSDDEWREYGLNHFILPKVLISSEGARTFITYTTERQDFDIEVFKDLITYLEHTGVDTSRDSLGEVTRMEDIYKDDWRDLVNEAIDTIDESKKIVLARRRLIKFDKEINIPFILNQALNNEKNSYIFLLESNQSVFFSQTPEQLIKVEDGVLSTKAVAGTIKRTHNEKVDEENIKAFLKDKKNLGEHRFVVESILSDIKPFVQDVEYNETPNILKNDHLYHLYTEIKANLNDESYIGLIDCLHPTPALGGYPKAEALEFIENKEFGTRGLYGSPVGFIDVYDDCEFIVAIRSMLIKDCQATLFAGCGIVKNSDPDSEVAETAVKFSPMMNALGVDNND

SEQ ID NO: 94938 - protein, 452 aa, Staphylococcus fleurettii
  REGION 1..452: note = tr|A0A431YZW4|A0A431YZW4_9STAP Isochorismate synthase OS=Staphylococcus fleurettii OX=150056; GN = CD142_10590 PE=4 SV=1
MTVDVCEQAIMDAVKQTTQQWVSIEVKLQKQLDPITLFEMSKEDAGDRFYFQLNDSKTTFFGYRVATKIKNDFTNKRSIFKEWEKFKDNIALIHPDSERHHLRICGGFQFSTKRLGDEWRRFGVNHFILPEVLISQVNDETFLTYTVQKETFSIDQFNALFDQLNHLETIEIKDTTPPPVKRMEDIYKDEWEALVAKTTEQLAHDEKIVLSRRRMVQFDADLSIPTILYRALQNEKNSYLFVLESEEDVFISQTPEQLFKVTNGELSTKAVAGTIRRTHDEKVDQAHVEAFLKDEKNLVEHEIVVESILEDIRPFTTHVDYNKEPKILKNDHLYHLYTEIGGPLAQKSYIELIDDLHPTPALGGYPKARALDYIEAHEFGARGLYGAPVGMIDMYDDCEFIVAIRSMLMNRHQALLFAGAGIVQESNAAEEVAETALKFKPMMEALGVTEYD

SEQ ID NO: 94939 - protein, 450 aa, Staphylococcus gallinarum
  REGION 1..450: note = tr|A0A3A0W0U0|A0A3A0W0U0_STAGA Isochorismate synthase OS=Staphylococcus gallinarum OX=1293; GN = BUZ14_03440 PE=4 SV=1
MTLDVKESEIVEAVYESKHTWVSVEATLDYELNPTELFHITEDSAGDRFYFRKNDNETSFFGYHAIKRFKNDFENKQSIFREWEKYKNDIALIHPSSTKHHLKICGGFQFSSHKSGDEWREFGINHFILPEVLVTMEQGKSYITYTVESDKFEIETFLAIIEKLTQPNISPDFERGDIKRIEDIYKDEWRDLVKDTIDILDENKKIVLARKRMIQFDKNINIPYILKQAIQGEHNSYLFVLESQGSVFFSQTPEQLMEVNDDVLSTKAVAGTIKRTHEETVDKANIDAFLNDEKNLNEHRFVVESILHDIKPYVEHIEFNKEPQILTNDHLYHLYTKIKGQLIDESYIGLLDSLHPTPALGGFPKKEAIEYIEQNEFGTRGLYGAPVGYIDMYDNCEFIVAIRSMLIKKNQATLFAGCGIVFDSDADSEVEETAVKFNPMMKALGVDDYE

SEQ ID NO: 94940 - protein, 455 aa, Staphylococcus haemolyticus
  REGION 1..455: note = tr|A0A2S6DX95|A0A2S6DX95_STAHA Isochorismate synthase OS=Staphylococcus haemolyticus OX=1283; GN = CV015_07605 PE=4 SV=1
MAANIKEDDIIESIYESNKSWVSVEVKIDRELAPDELFNLTESQAGDRFYFRLNDNASSFFGYHAVQRFKNNFDNKQSIFREWEKFKKDIELVHPDIEKHHLKVIGGFQFSSHKSDDEWREFGINHFVIPQVLISNIGQTTYLTYTVERAQFDIEQFKEVVNYFEETQIAKAEHDETLGNILRMEDIYVDEWKELVRDAIAQLDETKKIVLARRRMIKFDKPISIPYVLNRALQSERNSYLFILESNQSVFFSQTPEQLLKVEDGVLSTKAVAGTIKRSNDIDEDEKNIQAFLKDKKNLDEHDFVVKSILDDIKPYVDNIEYNHSPNILKNDHLYHLYTQIQGQLKNNSFIGLIDEMHPTPALGGYPKNEALKFIEENEFGTRGLYGAPVGYIDMNDDCEFIVAIRSMLIKQNQTTLFAGCGIVKDSDPDSELAETAVKFSPMMNALGVVDKNES

SEQ ID NO: 94941 - protein, 455 aa, Staphylococcus hominis
  REGION 1..455: note = tr|A0A4Q9WQC9|A0A4Q9WQC9_STAHO Isochorismate synthase OS=Staphylococcus hominis OX=1290 GN=EQ804_07260; PE = 4 SV=1
MAANLMEDKIMESIYESNKNWVSVEVVLNKSLTPSELFNLTEKQAGDRFYLRLNDNMSSFFGYHAIQRFKNNFENKQSIFREWEKFKNDVELIHVNTQKHHLKIVGGFQFSNHKSDDEWREFGINHFVVPEVLISSVNNQTILTYTVEKAQFEMEKLNQIINYFENTQVDTTERETALGNVTRMEDIYVDEWKDLVSHTIEQLDKDQKVVLARRRLIKFDKPISIPYVLNRALNNEKNSYLFILESNQSVFFSQTPEQLLKVEDGVLSTKAVAGTIPRTQDAEKDEKNVQEFLQDSKNLGEHQFVVRSILNDIEPYVENVEYNQKPNILKNDHMYHLYTEIKGTLLNHSYISLIDELHPTPALGGYPKKEAVDYIEKNEFGTRGLYGSPVGYIDVDDDCEFIVAIRSMLIKQNQTTLFAGCGIVKDSNAESEVEETSVKFSPMMNALGVVNENES

SEQ ID NO: 94942 - protein, 450 aa, Staphylococcus hyicus
  REGION 1..450: note = tr|A0A418JIU1|A0A418JIU1_STAHY Isochorismate synthase OS=Staphylococcus hyicus OX=1284 GN=BUZ57_06800; PE = 4 SV=1
MTVDVGEQEIIDAIANTSKTWISIEVRLPHTLDPVTLFRKTNQEAGNRFYFRLNDNETAFFGCRVAKEFKNNNKSKRSIFKEWNRFKEDIALIHPSTPKHHLRIYGGFQFSTERTSSEWQQFDMNHFILPEILISHIEGATYLTYTIRKTDFSFQEFKDIYTYLSHIDRTSHILEEHEMHVCAQQDLDIDAWERLVDKTIQQLKSDEKIVLSRRREIKFNTTIDIATVLNRALKNEKNSYLFLIESGNDCFISQTPEQLFKVQNNMLSTKAVAGTIKRTLNTEQDQAQVEAFLQDAKNLVEHHIVVESILEDIKPFVNDVHYHATPNILKNDHLYHLYTEISGPLATPNYIELIDVMHPTPALGGYPKAQAVQYIDAHEFNARGLYGAPVGMIDMYDDSEFIVAIRSMLINDNTALLFAGAGIVKESNAKAEVAETALKFSPMMDALGVN

SEQ ID NO: 94943 - protein, 452 aa, Staphylococcus intermedius
  REGION 1..452: note = tr|A0A380G7V2|A0A380G7V2_STAIN Isochorismate synthase OS=Staphylococcus intermedius NCTC 11048; OX = 1141106 GN=menF PE=4 SV=1
MSVDVCEQAIIDAVQQTKQQWVSVEVKLERQLDPITLFDMSKEDAGDRFYFRLNDNETSFFGYRVAAKIKNDFTNKRSIFKEWEKIKDDIALIHPDSERHHLRICGGFQFSTKRMGDEWRRFGVNHFILPEVLISQVNQETFLTYTVKKEAFSIERFYELVEMLNHVPRVVVQNTASPQIKRIEDIYKDEWQALVETTTAKLAHDEKVVLSRRRMVQFDADIEIGAVLYRALKNEKNSYLFVLESEDDIFISQTPEQLFKVTNGMLSTKAVAGTIPRTHNEAQDQARIDALLKNEKNLIEHGIVVESILEDIRPFIQYADYNHEPKVLKNDHLYHLYTEIGGPLAYQSYIELIDDLHPTPALGGYPKARALEYIEAHEFGARGLYGAPVGMVDMYDDCEFIVAIRSMLMNHQQALLFAGAGIVKDSDAAEEVAETALKFKPMMVALGVSEND

SEQ ID NO: 94944 - protein, 450 aa, Staphylococcus lentus
  REGION 1..450: note = tr|A0A4Y9KAI6|A0A4Y9KAI6_STALE Isochorismate synthase OS=Staphylococcus lentus OX=42858 GN=E4T78_10590; PE = 4 SV=1
MALRTDLKQNMISEIKGNKNYISVEIELQYQPDLINLLRKANHYLGQRFYYKSKDHRLEMCGIGYVLEARYSHLEHDKIYEYWQSIKEQLEAKVYHDKKHHLKFFGGFQFSEHALTNEWKDYGMSHFVLPKYLITIEDERCYLTYTEQSQKFNIEEINDILSKLDESKRTDIIETPTMISNKDIQSEEWKALVDKVVQFMKDSVALQKVVLSRRRQIVFENEVNIEDALQRSLNINESSYLLLFESGKSQFISQTPEQLCQISNGILYTNAIAGTISRTDDETINESLKDELLNDSKNQFEHRYVVDSIIHDIQSFTKHLEYDKKPTILTNKHLYHLYTKIQADLLSENVLEIVNQLHPTPALGGFPKAEAMRFIENEEFGTRGLYGAPLGYIDLEDNGEFIVSIRSMLVNENSATLYSGCGIVKDSNAESEFEETDLKFKPMLKALGVM

SEQ ID NO: 94945 - protein, 453 aa, Staphylococcus lugdunensis
  REGION 1..453: note = tr|A0A4Q9WCV8|A0A4Q9WCV8_STALU Isochorismate synthase OS=Staphylococcus lugdunensis OX=28035; GN = EQ812_03405 PE=4 SV=1
MAANLLEDEINHVLYSSNKDWVSVETKLHRELNPSELLQLTEAQAGDRFYLRLNDNKSSFFGYHAIQKFQNNFDNKQNIFREWEKFKHDIELIYPETDKHHLRICGGFQFSSHKSDDEWREFSINHFIVPEVLISRDEEGTVLTYTTKRLSFDMSRFKEIIDYFEHADITLDDDEILNVTKMEDIYKDEWRDLVQETIDYIDAHKKIVLARRRLVKFANNINIAHVLERAMANERNSYIFLIESNESIFISQTPEQLFKVENHVLSTKAVAGTIKRTHEEAEDKANVEAFLNDRKNLDEHRFVVNSILNDIEPYVTQVDYNKTPNILKNDHLYHLYTQITGKLNDKPYSDLIDFMHPTPALGGYPKEEALRYIEQKEFGTRGLYGSPVGFIDVYNDCEFIVAIRSMLVKQNQATLFAGCGIVKESNPDSEVAETAVKFLPMMNALGVVNKNES

SEQ ID NO: 94946 - protein, 451 aa, Staphylococcus microti
  REGION 1..451: note = tr|A0A0D6XQ66|A0A0D6XQ66_9STAP Isochorismate synthase OS=Staphylococcus microti OX=569857 GN=menF PE=4; SV = 1
MTVDAREQAINEAVKQADQRWVSIEVKLSRSLDPVTLFHVTNEAAGNRFYFRLNDNKTSYFGYRVATYIKNDNANKRALFEAWQSLKQDILCVHPDDKRHHLRLCGGFQFSMQRTGKEWETFGHNHFILPEVLISQVEGVTYLTYTVERDAFSMATLQEHISYFEMVAPVSDTIEMPQVDHIENIKQDAWQSLVAQTVARLARHEKIVLSRQRKVHFDSEIHIGAILQKALRHEKNSYLYVLESDTHTFISQTPEQLFKVTDGRLYTKAVAGTIHRTNDEAQDAERLTAFLQDKKNLGEHQIVVDSILEDIQPFVKNVTYDTTPKILKNDHLYHLYTEISGELDGATYIDVIDALHPTPALGGYPKAMAMAYIDEHEFAARGLYGAPVGMIDIYNDCEFIVAIRSMLVNGNEAMLYAGAGIVKDSDPASEVAETALKFSPMMDALGVTARD

SEQ ID NO: 94947 - protein, 451 aa, Staphylococcus muscae
  REGION 1..451: note = tr|A0A240C009|A0A240C009_9STAP Isochorismate synthase OS=Staphylococcus muscae OX=1294 GN=menF PE=4 SV=1
MTVDAREQAIKEAIKQATEQWVSVEVKLSHVIDPITLFDATKEAAGSRFYFRLNDNKTAFFGYRIATQIKNKQENKQAIFKQWQILRQNILFVNSESDRHHLRLCGGFQFSDHRTDDVWQAFDQHHFILPEVLISQVDGETFLTYTVERNAFSMDMFLHLIKQFEEITPLAETNDMPEVLHIENVQQQEWQNLVERTVEQLANDEKIVLSRQRKIKFSSQIHIDTILQNALRNEKNSYLFVIESGTDTFISQTPEQLFRVQDGMLSTKAVAGTLHRTQDSVEDDKRLQAFLQDEKNLGEHQIVVNSILEDLQPFVKKATYDAAPKILKNDHLYHLYTEIGGPLEGHSHMLLVDGLHPTPALGGYPKSMAMAYIDKYEYAARGLYGAPVGMIDAYDDCEFIVAIRSMLLKVDEAILYAGAGIVKASDPAAEVAETALKFSPMMDALGVTDIG

SEQ ID NO: 94948 - protein, 450 aa, Staphylococcus nepalensis; identical to SEQ ID NO: 93131
  REGION 1..450: note = tr|A0A2T4S812|A0A2T4S812_9STAP Isochorismate synthase OS=Staphylococcus nepalensis OX=214473 GN=entC; PE = 4 SV=1

SEQ ID NO: 94949 - protein, 450 aa, Staphylococcus pasteuri
  REGION 1..450: note = tr|A0A431ZFI7|A0A431ZFI7_9STAP Isochorismate synthase OS=Staphylococcus pasteuri OX=45972; GN = CD129_10565 PE=4 SV=1
MALRTDLKQKMISEIDGNKNYISVEIELQYQPDLIHLLREEINYIGQRFYYKSKDFKLEMCGIGYLLEARYSHLEHDEIYEYWQNIKEQLNTVIMHDDKHHLKFFGGFQFSEHSLTNEWKDYGMSHFVLPKFLITKENGRCYLTYTDDNNKFDIENIERILNAIDSKAQTGVLSEPSVVENKDIQSEEWKDLVTKVVSLMNESVALQKVVLSRRRKIEFQDDVNVEDALQRSLDSNESSYLLLFESGKSQFISQTPEQLCQIDNGKLYTNAIAGTIIRTEDESENNKLKAELLNDSKNQFEHRYVVDSIIHDIQSFTKQLEYDKKPTILTNKHLYHLYTKIQADLLSENVLEIVNQLHPTPALGGFPKVEAIKFIEHEEFGTRGFYGAPLGYIDLDNNGEFVVSIRSMLVRGNAATLYSGCGIVKDSNAITEFEETDLKFKPMLKALGVM

SEQ ID NO: 94950 - protein, 455 aa, unidentified
  source 1..455: note = Staphylococcus petrasii
  REGION 1..455: note = tr|A0A5F1B313|A0A5F1B313_9STAP Isochorismate synthase OS=Staphylococcus petrasii subsp. petrasii; OX = 1276937 GN=E2554_02075 PE=4 SV=1
MAANLKEDEIIESIYESNKNWISVEVILNRTLPPTALFQLTEDQAGDRFYLRLNDNQSSFFGYHAVQRFKNNFENKQSIFREWEKFKKDVELIHLETSKHHLKVVGGFQFSSHKSDDEWREYGINHFVVPKVLISNVDNQTLLTYTVERENFDMAQFKEIIDYFENAEVHEPDVNDAMGNITRMEDIYKDEWQELVSDAIAQLDEDKKIVLARRRLIKFDKTISIPYVLKRALENEKNSYIFILESNQSVFFSQTPEQLLKVDEGVLSTKAVAGTIKRTHNEDVDKQNVKAFLEDKKNLGEHRFVVRSILHDIEPFVDDVEYNQTPNILKNDHMYHLYTEIKGKLKSNSYIGLIDELHPTPALGGYPKDEALKFIEENEFGTRGLYGAPVGYIDMDDDCEFIVAIRSMLIKEKQTTLFAGCGIVKDSDPESELAETAVKFSPMMNALGVVDKNES

SEQ ID NO: 94951 - protein, 450 aa, Staphylococcus piscifermentans
  REGION 1..450: note = tr|A0A239U8Y4|A0A239U8Y4_9STAP Menaquinone-specific isochorismate synthase OS=Staphylococcus piscifermentans; OX = 70258 GN=menF PE=4 SV=1
MTVSVKDDQILDAVYENSEKWVSVEIKIDQPTDPIMLFQMTEGQAKDRFYFRDNSGKTAFFGYNALLKLKNNHENKQSIFREWEKYKEEIALIHPDTSHHHLKVCGGFQFSTHKSGDEWRQFGLNHFVLPKVLITMEGNHTYLTYTVPRDEFNIEDLKALSEKIISTEVQPTTPNGEIKRCEDIYKDEWLNIVQEAIETMNEDEKIVLARRRMIQFNKDIDIAYVLENALKSESNSYIFVIESEQSVFFSQTPEQLMEVDNQVLSTKAVAGTIKRTNDEEEDKQHLNAFLQDKKNLHEHRFVVQSILDDIEPYVDDVDYNQHPKILKNDHLYHLYTEISGTLKNKTYIGLLDRLHPTPALGGYPKEKAVDFIEQREFGTRGLYGAPVGYIDMEDNCQFIVAIRSMLIKQNQATLFAGCGIIKQSEPESELAETTLKFTPMMNALGVENHG

SEQ ID NO: 94952 - protein, 452 aa, Staphylococcus pseudintermedius
  REGION 1..452: note = tr|A0A3D8YLT2|A0A3D8YLT2_STAPS Isochorismate synthase OS=Staphylococcus pseudintermedius OX=283734; GN = DV946_06120 PE=4 SV=1
MSVDVCEQAIIDAVQQTKQRWVSVEVKLEQQLDPITLFDMSKEDAGDRFYFRLNDNETSFFGYRVAAKIKNDFTNKRSIFKEWEKFKDDIALIHPDSERHHLRICGGFQFSTKRMGDEWRRFGVNHFILPEVLISQVNQETFLTYTVQKEAFSIEQFYELVEKLNHLPRVVVQNTTPPQIKRIEDIYIDEWEALVEETTAKLAHDEKVVLSRRRMVQFDADIEIGAVLYRALKNEKNSYLFVLESEDDIFISQTPEQLFKVTNGMLSTKAVAGTIPRTHNEAQDQARINALLKNEKNLIEHGIVVESILEDIRPFIQYADYNREPQVLKNDHLYHLYTEIGGPLAHKSYIELIDDLHPTPALGGYPKARALEYIEAHEFGARGLYGAPVGMIDMYDDCEFIVAIRSMLMNHQQALLFAGAGIVKDSDAAEEVAETALKFKPMMVALGVSEHD

SEQ ID NO: 94953 - protein, 451 aa, Staphylococcus saccharolyticus
  REGION 1..451: note = tr|A0A431YM69|A0A431YM69_9STAP Isochorismate synthase OS=Staphylococcus saccharolyticus OX=33028; GN = CD121_07690 PE=4 SV=1
MAVNVKEDEIVNKLYGSSKDWVSVEVEINQSIDPSTLFHLTESQAGDRFYLRLNDNQSSYFGYHAIRKFKNNFENKQSIFKEWEALKKDIELIHPDSEKHHLRLCGGFQFSKHKSDDEWREYGLNHLVLPEVLISTEGQRHFITYTTERDKFDIDAFKTLVSQFEQANVDSYDEHIGNVTRMEDIYLDEWRDLVKEAIESIDYSKKIVLARRRLIKFDEEISIPYVLSKALKNEKNSYIFLLESNQSVFFSQTPEQLIKVENQVLSTKAVAGTIKRSHDEQEDQANINAFLNDKKNLGEHQFVVESILNDIQPYVEDVDYNETPNILKNDHLYHLYTQIEGKLNDHSYISLIDRLHPTPALGGYPKDEALEFIEKKEFGTRGLYGSPVGFIDVYDDCEFIVAIRSMLIKGDQATLFAGCGIVKDSDPDSEIAETAVKFSPMMNALGVDENE

SEQ ID NO: 94954 - protein, 450 aa, Staphylococcus saprophyticus
  REGION 1..450: note = tr|A0A380HGJ6|A0A380HGJ6_STASA Menaquinone-specific isochorismate synthase OS=Staphylococcus saprophyticus; OX = 29385 GN=entC PE=4 SV=1
MTLDDKESEIVEAVYESNQTWVSVEAKLDYELEPTLLFHLTEDCAGDRFYFKKNDNETSFFGYHAITRFKNDFENKQSIFREWEKYKNDIELIHPNSEKHHLKICGGFQFSTHKSGDEWREFGINHFVLPEVLVTMEAGQSFITYTVEADKFEMDAFLAIIDKLTQMDVQPNDEIGEIKRIDDIYKDEWRDLVKDTIDILDENKKIVLARKRLIMFDKNINIPYILNRAMQGEHNSYLFVLESKDSVFFSQTPEQLMEVKDDVLSTKAVAGTIKRTHRDDIDKANIDAFLNDKKNLNEHHFVVKSILNDIKPYVEQIAFNKKPQILTNDHLYHLYTKIEGRLIQNSYIGLLDNLHPTPALGGYPKEEAISYIENNEFGTRGLYGAPVGYIDMYDNCEFIVAIRSMLIKKNQATLFAGCGIVQNSDADSEVEETAVKFNPMMKALGVEKYE

SEQ ID NO: 94955 - protein, 450 aa, Staphylococcus schleiferi
  REGION 1..450: note = tr|A0A431YIC6|A0A431YIC6_9STAP Isochorismate synthase OS=Staphylococcus schleiferi subsp. schleiferi; OX = 74707 GN=CD117_12450 PE=4 SV=1
MALRTDLKQQIISEIDGNKNYISVEIELQYQPDLIHLLREEINYTGQHFYYKSKDSKLEMCGIGYLLEARYSHLEHDDIYEYWQNIKEQLDTIKLHDEKHHLKFFGGFQFSEHSLTNEWKDYGMSHFVLPKYLVTKENGHYYLTYTDHSNKFDIDNIQEVINILETENKKIESSEPVVVENKDIQSEEWKALVTKVVSQMNQSVALQKVVLSRRRQIEFEDRVNVEDALQRSLDSNESSYLLLFESGKSQFISQTPEQLCQIEDGKLYTNAIAGTILRTEDETKNDELKDELLNDSKNQFEHRYVVDSIIHDIQSFTKHIEYDKKPTILTNKHLYHLYTKIQADLLSENVLEIVNQLHPTPALGGFPKVEAIKFIEHEEFGTRGFYGAPLGYIDLENNGEFVVSIRSMLVNNHTATLYSGCGIVKDSEAISEFEETDLKFKPMLKALGVM

SEQ ID NO: 94956 - protein, 453 aa, unidentified
  source 1..453: note = Staphylococcus schweitzeri
  REGION 1..453: note = tr|A0A448CV44|A0A448CV44_9STAP Isochorismate synthase entC OS=Staphylococcus schweitzeri OX=1654388; GN = entC PE=4 SV=1
MATGVTEDDIVKEIYDSSKEWVSVEVKLSQSLDPSTLFHLTDNEAGGRFYMRLNDNRTSYFGYKAIQLFKNNFKNKQSIFREWEKLKQEIAFIHPQSGRHHLRIVGGFQFSSHKSDDEWREFGLNHFVLPEVLITTEDEDTFLTYTVQRENFDMDSFKALIEFFNNAMEIDVDDQNGEIIRNEDIYKDDWRQLVEEAIKSINKEEKIVLARRRLIKFDKVISIPYILKQAFSKEKNSYIFLLESQDSIFFSQTPEQLLKVNNRILSTKAVAGTIKRSHNEEEDKKHVEAFLKDNKNLVEHRFVVESILHDIEPYITELDYDKTPKILKNDHLYHLYTEIKAPLKDDSYIGLIDNLHPTPALGGYPKAFAIDFIEQKEFGTRGLYGAPVGYIDIYDDCEFIVAIRSMLIKQTQATLFAGCGIVKDSDPDSELAETNLKFSPMMNALGVDMNGKS

SEQ ID NO: 94957 - protein, 450 aa, Staphylococcus sciuri
  REGION 1..450: note = tr|A0A3S0JHY8|A0A3S0JHY8_STASR Isochorismate synthase OS=Staphylococcus sciuri subsp. rodentium; OX = 147469 GN=EKQ60_03655 PE=4 SV=1
MTVDVGEQEIIDAIANTSKTWISIEVRLPHTLDPVTLFRKTNQEAGNRFYFRLNDNETAFFGCRVAKEFKNNNKSKRSIFKEWNRFKEDIALIHPSTPKHHLRIYGGFQFSTERTSSEWQQFDMNHFILPEILISHIEGATYLTYTIRKTDFSFQEFKDIYTYLSHIDRTSHILEEHEMHVCAQQDLDIDAWERLVDKTIQQLKSDEKIVLSRRREIKFNTTIDIATVLDRALKNEKNSYLFLIESGNDCFISQTPEQLFKVQNNMLSTKAVAGTIKRTLNTEQDQAQVEAFLQDAKNLVEHHIVVESILEDIKPFVNDVHYHATPNILKNDHLYHLYTEISGPLATPNYIELIDVMHPTPALGGYPKAQAVQYIDAHEFNARGLYGAPVGMIDMYDDSEFIVAIRSMLINDNTALLFAGAGIVKESNAKAEVAETALKFSPMMDALGVN

SEQ ID NO: 94958 - protein, 450 aa, Staphylococcus simulans
  REGION 1..450: note = tr|A0A2X3QKM1|A0A2X3QKM1_STASI Putative menaquinone-specific isochorismate synthase; OS = Staphylococcus simulans OX=1286 GN=menF PE=4 SV=1
MTVSVKDDQILDAIYESREKWVSVEVKIDQPTNPIMLYQMTEDKADDRFYFRENTGETAFFGYNALLKFKNDYENKQTIFREWENYKNDIALIHPDSNKHHLKVCGGFQFSSHKSDDEWRQFGLNHFVLPKVLITMTASETFVTYTVLREEFNIEDLHELVQQVAETKVEPTQPIGDVVRSEDIYKEEWLELVQEAIDSMNDEEKIVLARRRMIRFDRPIDIAYVLENAMHNESNSYIFVMQSEGSVFFSQTPEQLMEVENQVLSTKAVAGTIKRTSDETEDQKHVDAFLKDEKNLQEHHFVVQSILDDIEPYVTDVDYNKHPKILKNDHLYHLYTEISGALENNTYIGLLDRLHPTPALGGYPKEKAMDFIEQKEFGTRGLYGAPVGYIDMEDNCEFIVAIRSMLIKKKQATLFAGCGIIKQSDPQSELEETTLKFTPMMNALGVENHG

SEQ ID NO: 94959 - protein, 450 aa, Staphylococcus sp.
  REGION 1..450: note = tr|A0A3G4QXM0|A0A3G4QXM0_9STAP Isochorismate synthase OS=Staphylococcus sp. SDB 2975 OX=2044912; GN = CNQ82_04990 PE=4 SV=1
MTVSVKDDQILDAVYENSEKWVSVEIKIDQPTDPIMLFQMTEGQAKDRFYFRDNSGKTAFFGYNALLKLKNNHENKQSIFREWEKYKEEIALIHPDTSHHHLKVCGGFQFSTHKSGDEWRQFGLNHFVLPKVLITMEGNHTYLTYTVPRDEFNIEDLKALAEKIISTEVQPTTPNGEIKRCEDIYKDEWLNIVQEAIETMNEDEKIVLARRRMIQFNKDIDIAYVLENALKSESNSYIFVIESDQSVFFSQTPEQLMEVDNQVLSTKAVAGTIKRTNDEQEDKQHLDAFLQDKKNLHEHHFVVQSILDDIEPYVEDVDYNQHPKILKNDHLYHLYTEISGTLKNKTYIGLLDRLHPTPALGGYPKEKAVDFIEQREFGTRGLYGAPVGYIDMEDNCQFIVAIRSMLIKQNQATLFAGCGIIKQSEPESELAETTLKFTPMMNALGVENHG

SEQ ID NO: 94960 - protein, 444 aa, unidentified
  source 1..444: note = Staphylococcus stepanovicii
  REGION 1..444: note = tr|A0A239ZSB1|A0A239ZSB1_9STAP Putative chorismate binding enzyme OS=Staphylococcus stepanovicii OX=643214; GN = dhbC PE=4 SV=1
MKQKMISEINGDKSYISVEIELQYQPDLIHLLKKEIKYEGQRFYYNSKNHQLEMCGIGYVLQARYSHLKYDETYEYWQNVKEQLEKRVFHGGQHHLKFFGGFQFSEHALTNEWKDYGMSHFVLPKFLVTIEDNTCYVTYTEQSKHFDINEMDEFLNQLESNKIVMEEKEQEIMSNKDIQSEEWKDLVTKVVNLMNDSVALQKVVLSRRRNIIFKNKIDIEDALQRSLNINESSYLILFESGSSQFISQTPEQLCQIDNGKLYTNAIAGTILRTHDEQENQKLKETLLNDSKNLFEHRYVVDSIIHDIQSFTKNLNYEKKPTILTNTHLYHLYTNIQADLLSENVLEIVNQLHPTPALGGFPKLEAIKFIENEEFGTRGFYGAPIGYMDLDNNGEFVVSIRSMLVKDNMATLYSGCGVVKDSNADSEFEETDLKFKPMLKALGVM

SEQ ID NO: 94961 - protein, 451 aa, Staphylococcus warneri
  REGION 1..451: note = tr|A0A364UPP3|A0A364UPP3_STAWA Isochorismate synthase OS=Staphylococcus warneri OX=1292 GN=E4T90_00310; PE = 4 SV=1
MTVNVREDEIVDKLYGSSKDWVSVEVELDKQLDPSTLFHITESQAGDRFYLRLNDNQSSYFGYHAIRKFENDFENKQSIFKEWETLKKDIELIHPDSEKHHLRLCGGFQFSKHKSDDEWRAYGLNHFVLPEVLISTENNRTFITYTTEKKTFEMDTFKSLVNDLEQANVDMEDDHLGNVTRMEDIYLDEWRDLVQEAINSIDYSKKIVLARRRLIKFDKEISIPYILTRALKNEKNSYIFLLESNESVFFSQTPEQLLKVENQVLSTKAVAGTIKRSQNEQEDEENLQAFLNDKKNLNEHQIVVESILNDIQPYVEDVYYNETPNILKNDHLYHLFTKIQGNLKEQSYIGLIDRMHPTPALGGYPKDEALEFIEQKEFGTRGLYGSPVGYIDVYDDCEFIVAIRSMLIKGDQATLFAGCGIVKDSDPDSEIAETAVKFSPMMNALGVDKHE

SEQ ID NO: 94962 - protein, 450 aa, Staphylococcus xylosus
  REGION 1..450: note = tr|A0A418IQG1|A0A418IQG1_STAXY Isochorismate synthase OS=Staphylococcus xylosus OX=1288 GN=BU097_03910; PE = 4 SV=1
MTFDVKESEIVEAVYESNHTWVSVEAKLNYELDPTLLFHITEDCAGDRFYFKKNDNETSFFGYHAITRFKNDFENKQSIFREWEKYKNDIELIHPNSDKHHLKICGGFQFSTHKSGDEWREFGINHFILPEVLVTMEQGYTYITYTVKSDQFEISTFLSIIDKLTQTTVYPDFEIGNIKRIEDIYKDEWRDLVKDTIDILDESKKIVLARKRLIIFDKQIKIPYILNKASQGEHNSYLFILESQDSIFFSQTPEQLMEINNEILSTKAVAGTIKRTHQAELDKENIQAFLNDEKNLNEHRFVVESILNDISPYVEDVTYNQEPQILTNDHLYHLYTKIKGQLKYESYIGLLDNLHPTPALGGYPKFEALEYIEQNEFGTRGLYGAPVGYIDMYDNCEFIVAIRSMLIKKNQATLFAGCGIVSDSDADSEVEETAVKFNPMMKALGVEEYE

SEQ ID NO: 94963 - protein, 404 aa, Starkeya sp.
  REGION 1..404: note = tr|A0A556PHE0|A0A556PHE0_9RHIZ Isochorismate synthase OS=Starkeya sp. 3C OX=2597768 GN=FO470_00275 PE=4; SV = 1
MCDAAEKAAAEAAPFAPALPFALVSGEETLVGRGCLGLVEDGPSPLGERARALIEAEGAGPRLVVGALPFDRAAAPHLYRPAELSRSAGRSCFAAAFPPPSLVRGAAPPPRWEVTPEPSLVAYESAVAEALSRMARREEGLRKIVLSRSLRLLADRAIDASALLRALSEDASVTAFCVPLVAAGSGEASRALVGATPELLLSKRGARVVSHPLAGSARRAREDAADRAAAEGLLASEKDRREHREVVTAILDLLAPYCTELAAPEAPALAATASMWHLGTRIVGRLRDAATSALDLAALLHPTPAVCGTPRAAAARAIAELEGYKRGFYAGAVGWCDAAGDGAWHVAIRCAEIAGREARLFAGAGIVAGSDPVAEGEETSAKFTALLGALGIDEHGRVRSEEQA

SEQ ID NO: 94964 - protein, 397 aa, Stenotrophomonas maltophilia
  REGION 1..397: note = tr|A0A3R8TDV9|A0A3R8TDV9_STEMA Isochorismate synthase OS=Stenotrophomonas maltophilia OX=40324; GN = EGJ24_20640 PE=4 SV=1
MNDSLMQGAWPEAAPAPQENTDDASLFLLQHAGQHVHARGCRAALPAGALATLAERVSEFFAQQRGGPGLLVGAVPFEPRADDALYQPERLLPALALQPQAAPPLDGALRAEPVPQDYASAVAAAVQVLRAPEQNLHKVVLARSLLARTREALSPDVLLARLGADPSVATYAVPLPVELGQAPAWLVGATPELLLRKRGAELLSHPLAGSARRSADAAEDERAAQALLASTKDHDEHRHVVDAIVEGLAPYCSHIDAQPRPVLHATASMWHLGTRIHATLKDPQTSAAELLAQLHPTPAVCGTPRLAALQRIRELEPVPRGFYAGAVGWLDAQGDGDWYVAIRCARLQGTQLRLYAGAGIVAESEPEAEVAETAAKFAALLNALGVHESAPSIEPAA

SEQ ID NO: 94965 - protein, 397 aa, Stenotrophomonas sp.
  REGION 1..397: note = tr|A0A4Q1CWM4|A0A4Q1CWM4_9GAMM Isochorismate synthase OS=Stenotrophomonas sp. MA5 OX=2508572; GN = ERT44_03985 PE=4 SV=1
MNDSLRDDAWQETAPLPLPAADDPTLFLLQHAGQHVHARGCRAALASGPLVTLAGRVAAFFAQQRGGPGLLVGAIPFEPRADDALYQPERVLPALPVQPQAAPALEGVVQAEPSADDYAAAVDRAVQALRDPRQDLHKVVLARSLLAHTRHALTPDVLLARLGADPSVATYAVPLPVELGQAPAWLVGATPELLLRKRGAQVLSHPLAGSARRSADPVQDERAAQTLLASAKDHDEHRHVVEAIVDGLSPYCSHIDAQARPVLHATATMWHLGTRIHATLKDPRVPAAALLAQLHPTPAVCGTPQQAALQRIRELEPVPRGFYAGAVGWLDAQGDGDWYVAIRCARLQGTQLRLYAGAGIVAGSQPQAEVAETAAKFAALLNALGVSEPAPPTEPLA

SEQ ID NO: 94966 - protein, 406 aa, Stigmatella aurantiaca
  REGION 1..406: note = tr|E3FDX2|E3FDX2_STIAD Isochorismate synthase; OS = Stigmatella aurantiaca (strain DW4/3-1) OX=378806; GN = STAUR_3597 PE=4 SV=1
MTTERPMPPQKLAAQLLESYEAGSSFFFASPKRTMLARGTFATVPHMDGADALQRLPERVAAVLNNAREAAHDIPVAVGAVPFDGSIPAQMVVPMTLQRAGPLVFDADVPVHQPLAARYTVQPVPEPAAYLDGVTQALKLMQTGSLRKVVLSRSLHLSATTPIDLPQLLRNLAQRNPSGYTFAVDLPTETAGGRRRTLIGASPELLVSRSGLQVLANPLAGSAARSADPIEDQERAATLLKSPKDLHEHAVVIDAVVEAMRPYCKKLDVPAGPSLVSTQTMWHLSSRICGELADPSITSLKLAVALHPTPAVCGYPTELAHEAITTIEPFDRGFYTGTVGWCDVNGDGQWAVTIRCAEADERTLRLFAGAGIVVGSKPESELAETEAKFRTMLQAMGLGQNSEVKS

SEQ ID NO: 94967 - protein, 476 aa, Streptococcus dysgalactiae
  REGION 1..476: note = tr|A0A4U9ZKQ5|A0A4U9ZKQ5_STREQ Anthranilate synthase component I OS=Streptococcus dysgalactiae subsp. equisimilis OX=119602 GN=entC PE=4 SV=1
MSRLAPLSQCLHALRGTFERAIGQAQALDRPVLVAASFEIDPLDPLQVFGAWDDRQTPCLYWEQPELAFFAWGCALELQGHGEQRFARLEDSWRLLCAEAVVEGPLAPRLCGGFRFDPRGPRQEHWQAFADASLMLASLTVLREGERHRVLCQHLAKPGEDALALAAFHCSALLRLRQPARRRALPANAGEQQDASPLERRQWEGKVADAVRGVRQGRFGKVVLARAQVQPLGEIEPWQVLEQLRLRHAEAQLFACRRGNACFLGASPERLVQVRDGALRTHALAGTTARGGDAGEDTRLGQALLDSAKERHEHQLVVEAIRAALEPFSEALRIPATPALKRLARVQHLNTPIQARLADGQGILRLVEALHPTPAVGGYPRSAALDHIRQHEGMDRGWYAAPLGWLDGEGNGDFLVALRSALLTPGQGYLFAGCGLVGDSEPSHEYRETCLKLSAMQDALSAAGGLGEAPLQRGVA

SEQ ID NO: 94968 - protein, 391 aa, Streptococcus pneumoniae
  REGION 1..391: note = tr|A0A4U9M3W6|A0A4U9M3W6_STREE Anthranilate synthase component I OS=Streptococcus pneumoniae OX=1313 GN=trpE_1; PE = 4 SV=1
MDTSLAEEVQQTMATLAPNRFFFMSPYRSFTTSGCFARFDEPAVNGDSPDSPFQQKLAALFADAKAQGIKNPVMVGAIPFDPRQPSSLYIPESWQSFSRQEKQTSARRFTRSQSLNVVERQAIPEQTTFEQMVARAAALTATPQVDKVVLSRLIDITTDAAIDSGVLLERLIAQNPVSYNFHVPLADGGVLLGASPELLLRKDGERFSSIPLAGSARRQPDEVLDREAGNRLLASEKDRHEHELVTQAMKEVLRERSSELHVPSSPQLITTPTLWHLATPFEGKANSQENALTLACLLHPTPALSGFPHQAATQVIAELEPFDRELFGGIVGWCDSEGNGEWVVTIRCAKLRENQVRLFAGAGIVPASSPLGEWRETGVKLSTMLNVFGLH

SEQ ID NO: 94969 - protein, 398 aa, Streptomonospora alba
  REGION 1..398: note = tr|A0A0C2JU94|A0A0C2JU94_9ACTN Isochorismate synthase OS=Streptomonospora alba OX=183763 GN=LP52_00670; PE = 4 SV=1
MFHQYNHPAAAAAGDLLDAYRPGNAFLAAPSGAILGEGAAAAAERLEDVGDLLAQGTADSASGPIAIGAIPFDAAAPGRLVVPDRVRQAPPLTESRNSHRGQRPLPGPWAMRPLPEPAEHAAGVERLLKRLARGDGDDGPAKIVLARSLRLSGPGPVDVGQLLNNLAWRDPAACTFALDLPAASPAPRTLVGASPELLVAKRGGRVVSNPLAGSAPRSADPSKDQLSAVELLGSAKDRHEHAVVVEAVTEALRPYCRTLEVPEPELARTATLWHLSTRVTGELIDPATPSPVLAAALHPTPAVCGSPTDAARAAIAEIEPFDRGFYTGAVGYTDARGDGEWIVSIRCADVAGDTLDLFAGGGIVGDSEPDAELAETSAKLRTLLLALGVNQPLIAPPR

SEQ ID NO: 94970 - protein, 427 aa, Streptomonospora sp.
  REGION 1..427: note = tr|A0A4P6Q5F4|A0A4P6Q5F4_9ACTN Salicylate biosynthesis isochorismate synthase OS=Streptomonospora sp. M2 OX=2498135 GN=pchA PE=4 SV=1
MTTAPHDPADLPALTVRTVPLAGAPDLIARLGPAAPMAWLRRGEGLVGWGEAARLEFPAESAPEGTGRFAGAARALDALRARARVLDEVGAPGTGPVAFGGFTFDPRSGGSVLVVPRVVVGYRGGRAWVTTAARGGEEQPAEAPDAIAEGPPPAPVGPLDWQAGSLSAGEWGAAVGRAVERIRGAELDKVVMARDVIARARAPIDVRTLLGRLARSYPDCYTFSVAGMVGATPELLLRREGDEVESLVLAGTRPRAADPGEDARLGRELQESAKDREEHRYAIDSLRATLAPLCASVEAPERPRLLRLANVQHLASPARARLLPGASTLDAVAALHPTAAVGGSPTGAAMRMIRELEGMDRSRYAGPVGWIDGDGNGEWGIALRCALVEGARARLFAGCGIVAGSEPAAEVAESESKLQVMRAALTD

SEQ ID NO: 94971 - protein, 122 aa, unidentified
  source 1..122: note = Streptomyces albireticuli
  REGION 1..122: note = tr|A0A2A2CZK1|A0A2A2CZK1_9ACTN Isochorismate synthase (Fragment) OS=Streptomyces albireticuli OX=1940; GN = CK936_33660 PE=4 SV=1
MTTAHHVADRPSEPGVPAPAGSGPAAPGAPGHRPAGAADTVGAATSLLDAYEPGRARFFASPTRTLLAHGVRAEVPHGTTPLVRRVTETLDAQLLAGHEAPVVIGAVPFAPTAPAALAVPEA

SEQ ID NO: 94972 - protein, 414 aa, Streptomyces albus
  REGION 1..414: note = tr|A0A0X7JBR2|A0A0X7JBR2_9ACTN Isochorismate synthase OS=Streptomyces albus subsp. albus OX=67257; GN = ADL21_33230 PE=4 SV=1
MPTAPEVATHVPLAEPAHPAVGWGLPCSNEAESLGKATALLDAYTPGARFLGTPTRTILAQGTHRDVPHDERPLPQRVAATLDAARAAGHGAPLVVGAVPFDQTAPAALTVPGSVRTAPPLTADPLIALPADPPAAAAWDIRPVPEPEVYGAGVAAAVERMWRGEFSKVVLARTLELTTNDPLDIPAMLQRLARRDPSGYTFALPTAPGRTLLGASPELLVSRRGDRVVANPLAGSTPRSDDLAEDVRRAAALLESAKDLHEHAVVVDAVHRALAPYCTGLTVPARPTLLRTATMWHLSTTVTGTLAAPDTSALELACALHPTPAVCGTPTGTARQVITDTEPFDRGFFTGMVGWGDASGDGEWVVTIRCAEAEERSLRLYAGAGVVAASEPAAETAETGAKFRTFLSAVGAEL

SEQ ID NO: 94973 - protein, 395 aa, unidentified
  source 1..395: note = Streptomyces caatingaensis
  REGION 1..395: note = tr|A0A0K9XNE2|A0A0K9XNE2_9ACTN Isochorismate synthase OS=Streptomyces caatingaensis OX=1678637; GN = AC230_02840 PE=4 SV=1
MPDRPASGPGPDTVGAATALLEGYDHRDARFFASPTRTLLAHGVRAEVPHGDAPLHRRVTETLDAQLLDGHENPVVVGAVPFLPGAPAALAVPRTVRLAPPLSHDPLAALPAAPPAALDWDVRPVPEPAGYAAAVATAVARMKRGEFGKVVLSRTLELTAPQDPDLPGLLRRLARRDPSGYTFAVPSGPGRTLLGASPELLLSKRGGRIVTNPLAGSTPRSADLAEDVRRAAALLESEKDLHEHALVVDAIREALAPYCRTMDVPRRPTLVRTAAMWHLSTTITADPTDPGVSALELACALHPTPAICGTPTDTARTVIGELEPFDRGPYTGMVGWGDANGDGEWVVTIRCAEAEGRTLRLFAGAGIVEQSDPEAETAETAAKFRTFLQAVGVDR

SEQ ID NO: 94974 - protein, 390 aa, Streptomyces cinnamoneus
  REGION 1..390: note = tr|A0A2G1XAX9|A0A2G1XAX9_STRCJ Isochorismate synthase OS=Streptomyces cinnamoneus OX=53446; GN = BLA24_32605 PE=4 SV=1
MPADRDATVGAATSLLDAYEPGRARFFASPTRTLLAHGARAHVPHGDAPLARRVAETLDAELLAGNAAPVVVGAVPFDHTAPAALAVPEAVRWAPPLAEDPLVALPAAPPAPAAWDVRPVPEPGVYGDAVAEAVRRMNRGEFSKVVLARTLELRSSRDLDLPALLQRLARRDPTGYTFAVPSGPGRTLLGASPELLVSRRGGRLVANPLAGSTPRSADLAEDVRRAAALLESAKDLHEHAVVVDAVRAALAPYCRTLEVPARPTLVRTATMWHLSTTVTGEPADPAVSALELASALHPTPAVCGTPTATARDVIGELEPFDRGFFTGMVGWGDANGDGEWVVTIRCAEAAERSLRLYAGAGVVAQSSPEAETAETGAKFQTFLQAVGVDQ

SEQ ID NO: 94975 - protein, 398 aa, unidentified
  source 1..398: note = Streptomyces dengpaensis
  REGION 1..398: note = tr|A0A2L2MF49|A0A2L2MF49_9ACTN Isochorismate synthase OS=Streptomyces dengpaensis OX=2049881; GN = C4B68_04530 PE=4 SV=1
MSAFLRDTTATPFVSPGAATALLDAYRPATDRFLASPHHTLLGRGTAAGIPHDTRPLTWRVRNVLNARRRAGASAPVVVGSVPFAPDAPHSLVSPQSVQWGPPLREDPLIALPALLPEGGTVWQVREVPAPEQYGQAVADAVTRMRSGEFTKVVLARTLELTSPDEPDLPAMLSRLARRDPAGYTFAVPSGPGRTLIGASPELLVARTGGRLTGNPLGGSAARSTDLAEDVQRAAALLESPKDLHEHAVVVDAVREALAPFCTRLEVPERPTLVRTATMWHLSTTVTGELTDPGVTALELALALHPTPAVCGTPTDVARAVIAESEPFDRGPYTGMVGWQDADGDGEWVVTIRCAEAEGRSLRLFAGAGVVAASSPEAETAETGAKFRTFLEAMGASL

SEQ ID NO: 94976 - protein, 381 aa, Streptomyces eurocidicus
  REGION 1..381: note = tr|A0A2N8NVA7|A0A2N8NVA7_STREU Isochorismate synthase OS=Streptomyces eurocidicus OX=66423; GN = AF335_18965 PE=4 SV=1
MLDAYEPGRARFFASPTRTLLAHGVRAEVPHGTAPLVQRVTETLDAQLLAGHAAPVVIGAVPFDPTAPAALAVPEAVRWAPPLAEDPLIALPAAAPAAARWDIRPVPEPAVYGAAVAEAVRRMKRGDFSKVVLARTLELRSDRDLDLPALLQRLARRDPSGYTFAVPSAPGRTLLGASPELLVARRGRTLVANPLAGSTPRSADLAEDVRRAAALLQSEKDLHEHAVVVDAVREALAPFARTLDVPARPTLVRTAAMWHLSTTVTGELADPAVSALELAAALQPTPAVCGTPTDVARDVITELEPFDRGAYTGMVGWGDARGDGEWVVTIRCAEAEGRTLRLFAGAGVVEQSSPEAETAETGAKFRTFLDAVGADQQEAGR

SEQ ID NO: 94977 - protein, 401 aa, unidentified
  source 1..401: note = Streptomyces formicae
  REGION 1..401: note = tr|A0A291QAC0|A0A291QAC0_9ACTN Isochorismate synthase of siderophore biosynthesis OS=Streptomyces formicae OX=1616117 GN=KY5_3429 PE=4 SV=1
MSTAPEVATHVTTAEQAHPAVGAATALLDAYTPGERFLATPTRTLLTEGVHAHVPHDERPLPHRIAATLADARRTGPAKPYVVGAIPFDHTAPAALAVPRALRTAPPLTADPLIALPADPPDATDWRIRPVPSPEAYGAGVASAVERMWRGDFSKVVLARTLELTAQAPLDLPVMLQRLARRDPSGYTFALPTAPGRTLIGASPELLVSRRGHQVVANPLAGSTPRSDDLAEDVRRAAALLESAKDLHEHAVVVDAVHQALASFCTDLTVPARPTLIRTATMWHLSTTVTGTVASPDTSALELACALHPTPAVCGTPTATAREVIRETEPFDRGFFTGMVGWGDANGDGEWVVTIRCAEAEERSLRLYAGAGVVAASEPEAETAETGAKFRTFLNAVGAEL

SEQ ID NO: 94978 - protein, 404 aa, Streptomyces griseocarneus
  REGION 1..404: note = tr|A0A3L8J5B7|A0A3L8J5B7_9ACTN Isochorismate synthase OS=Streptomyces griseocarneus OX=51201; GN = CTZ27_22085 PE=4 SV=1
MTTPLRQPGLAIAEQDPSPVTPGEAVALLDAYRPGTDRFLATPRRTLLAHGTAAEVPDDGRPLPQRVHDLLNALRQPGEPAPLLLGAVPFAPGARPSLAVPMSVRSAPALCEDPLIALPAPDAVDGAGWQVREWPPAEGYAAAVASAVHRIRAGEFDKVVLARTLELTAPHMPDLPAMVNRLARRDPSGYTFAVPTGPDRTLLGASPELLVARQGGLLTANPLAGSAQRSTDLAEDVRRAAALLESPKDLHEHAVVVDAVRDALAPFCRRLEVPERPTLVRTATMWHLSTTVTGEVADPSVTALDLASALHPTPAVCGTPTDVARTVIAESEPFDRGAYTGLVGWQDADGDGEWVVTIRCAEAEGRTLRLFAGAGVVGDSSPEAETAETAAKFRTFLDAVGAAL

SEQ ID NO: 94979 - protein, 401 aa, Streptomyces griseoflavus
  REGION 1..401: note = tr|A0A0L8MMR4|A0A0L8MMR4_9ACTN Isochorismate synthase OS=Streptomyces griseoflavus OX=35619; GN = ADK76_35160 PE=4 SV=1
MPTAPEVATHVPLAEPAHPAVGAATSLLDAYTPGARFLGTPTRTILAQGTHRDVPHDERPLPQRVAATLDAARAAGHGAPLVVGAVPFDQTAPAALTVPGSVRTAPPLTADPLIALPADPPAAAAWDIRPVPEPEVYGAGVAAAVERMWRGEFSKVVLARTLELTTTDPLDIPAMLQRLARRDPSGYTFALPTAPGRTLLGASPELLVSRRGDRVVANPLAGSTPRSDDLAEDVRRAAALLESAKDLHEHAVVVDAVHRALAPYCTDLTVPARPTLLRTATMWHLSTTVTGTLAAPDTSALELACALHPPPAVCGTPTDTARQVITDTEPFDRGFFTGMVGWGDASGDGEWVVTIRCAEAEERSLRLYAGAGVVAASEPAAETAETGAKFRTFLSAVGAEL

SEQ ID NO: 94980 - protein, 650 aa, Streptomyces griseus
  REGION 1..650: note = tr|A0A380NDG8|A0A380NDG8_STRGR Anthranilate synthase; OS = Streptomyces griseus OX=1911 GN=menF PE=4 SV=1
MAPTSPAAPPPPAEPYDLARLTAPGAGPFALLRRSAPGLDGRTVEVLTGPVREVERLADLPVDGRPALALVPFRQIRERDFDVRDDGTGLVVLHADAVHRMPVDEALAALPAHRVEVADGGFDLDDEGYEEVVRRVVTDEIGRGEGANFVISRTWQGRIEGFSRADALALFRRLLAQERGAYWTYVVHTGERTLVGASPEAHVRMSGGARDGVASGTGGTVVMNPISGTYRYPAGGPTAEGVLEFLADAKERDELSMVVDEEMKMMCAVGDLGGVVVGPRLKEMAHLAHTEYELRGRSTLDVREVLRQTMFAATVTGSPVQNACRVIERYEPAGRGYYAGALALLFTDEAGAQCLDSPILIRTADIDPAGVVRVRVGATLVRGSDPAGEVAETHAKAAGVLAALGVRPGRPAGGAAPVRFADDIRVRAALDARRERLSPFWLRMREPAAAVAGDALVVDAEDTFTSMLAHVLRAAGHRVAVRRFDEPGLRAAVAAHRGTVVLGPGPGDPSDPADPRMRLLREVTREVLDGRHGGRGVLGVCLGHELIAAELGLPLVRKRVPHQGAQVRIDLFGRPETVGFYNSYVASCDDEAAAELAAHGVEVSRDAAGEVHALRGPGFASVQFHPESVLSLRGPALVAELLAGVPAEVG

SEQ ID NO: 94981 - protein, 407 aa, unidentified
  source 1..407: note = Streptomyces hoynatensis
  REGION 1..407: note = tr|A0A3A9YSG1|A0A3A9YSG1_9ACTN Isochorismate synthase OS=Streptomyces hoynatensis OX=1141874; GN = D7294_22740 PE=4 SV=1
MSSVPDLARQPPTPLPSAVGAATALLDAYAPGARFLATPTRTLLAGGVHSTVPHGETPLSERVAAALGAARAAGHPAPLALGAVPFDERAPAALVVADALRTAPPLSADPLSALPAKPPAPADWRIRQVPAPERYGALVAAAVRRMREGGLRKVVLARTLELDADRPLDLPGVLRGLARRDPAGYTFALPTGPGRTLLGASPELLVSRTGGRLVANPLAGSAPRSADLAEDIRRAAALLESPKDLHEHAVVVDAVRAALAPHCARLHVPARPTLVRTAAMWHLSTTVTGDLGARPASALELARALHPTPAVCGTPTAEARRVIRETEPFDRGWFTGMVGWMDAGGDGEWVVTLRCAEAGERSVRLYAGAGIVPASRPAAEIAETAAKFRTFLTALGAGGQPVRQPGR

SEQ ID NO: 94982 - protein, 414 aa, unidentified
  source 1..414: note = Streptomyces jeddahensis
  REGION 1..414: note = tr|A0A177HSL8|A0A177HSL8_9ACTN Isochorismate synthase DhbC OS=Streptomyces jeddahensis OX=1716141; GN = dhbC PE=4 SV=1
MNRGLTRAGRGPMPDHARPRTGRSRRRLIAAPAGFLLHGPSGSVGLDGPLTSFRGLSEAENAVREGTHGNIVAGAVPFDQESGTSSFYLGRRVTGRPAVLGRPTRRSQFVPDVIFNDTEIAGYIRMVDHVLPMLRSPNDVLEKIVAARAERFFTTEPVDPLQLYGRIVDMYPRVHSYLVEHLETPGVYTMGASPELFVKKTGDIVTMTPLAGTIPRNPSLSTPEDTARAHAELFTDKYLVEHRHLVEFMLKGLAPFCTVVDHTHEPQLIDVPGVWHLGTPIRGRLTSPGVRVADLVSALHPSPAVCGVPQSASLQLITTNESPRGYYGGLVGWLDSNGDCELYMALRGLDFDARNGCLTLRAGGGIVKGSRMDVEFTETTAKLATMRRVLGITPLLEASASSRSGRPVREAANA

SEQ ID NO: 94983 - protein, 400 aa, Streptomyces lavendulae
  REGION 1..400: note = tr|A0A5C8GZ90|A0A5C8GZ90_STRLA Isochorismate synthase OS=Streptomyces lavendulae OX=1914 GN=E2C11_17850; PE = 4 SV=1
MSLSTLMRPSPMHRPSDLLAAYLTGSFYFSSARGTLLADGVHTRVRAGSGARALAAAEALDAAAVAGLPDPVVVGAAGFRPDGDAGLLVPAVVRRAGAPSALAGHPRQPGPGTGWTVRPRPEPEGYTAAVSRALELIGDGELRKVVLARSLELAGEHPVAVPALLTRLVHADPASYAFAADVTAPGDPAPRTLVGASPELLVSRRGAHVTANPLAGSAPRAGDERLDRERIARLRDSAKDLGEHAHTAAQVAEVLGRFCADLDVPERPEVIGTPTMWHLSTRITGRLRDPLDPACSALGLAEALHPTPAVCGVPAPRALTAIAELEPEDRGYYAGMVGWSGLDGDGEWAVTIRSAEVCDRTVRLFAGAGIVPGSDPQAELAETSAKFRTLLRALGLEHLV

SEQ ID NO: 94984 - protein, 403 aa, Streptomyces lydicus
  REGION 1..403: note = tr|A0A3Q9K757|A0A3Q9K757_9ACTN Isochorismate synthase OS=Streptomyces lydicus OX=47763 GN=DDE74_05045; PE = 4 SV=1
MSASLCEPTAPPPDPTLPLLAPGAATTLLDAYLPGADRFLASPRHTLLAHGTAAEIPHDTRPLTRRVRDTLDARRRAGDPAPVVVGSLPFAADAPHALVVPDSVRWAPPLHEDSLIALPVAPAEDTDWQLREVPSAERYAAAVAAAVARMQAGEFDKVVLARTLELTAQREPDLTAMLRRLARRDPAGYTFAVPSGAGRTLIGASPELLVARRNGRLVANPLAGSAPRSADLAEDVRRAAALLESAKDLHEHAVVVDAVREALAPYSTGLEVPARPTLVRTAAMWHLSTTVTGELADPAVSALELASALHPTPAVCGTPTDVARSVIAESEPFDRGPYTGMVGWQDADGNGEWVVTIRCAEAEGRTLRLFAGAGVVAASSPQAETAETGAKFRTFLSAVGASL

SEQ ID NO: 94985 - protein, 319 aa, Streptomyces malaysiensis
  REGION 1..319: note = tr|A0A291T3Z7|A0A291T3Z7_9ACTN Menaquinone-specific isochorismate synthase OS=Streptomyces malaysiensis; OX = 92644 GN=SMALA_7639 PE=4 SV=1
MAFPFQRHEPIRLAVPARTLSLSQEEAADHRRLLASVPSPSAKSGEPGTYALRPSESPEQWCGSVADAARAVRRGELRKAVLARRIQMECDADIQPSVVLRRLAHTFPSAYLFSAFGLVGASPELLLAKRGRMVESRALAGTIRRGGDAESDRRLAAWLQESGKNQEEHRVLREAVLDALAPSTTWIEANERPEMLKLANVQHLMTRVRAELVADHPSFLRLAAMLHPTPAVCGWPRDKAYEVIERLDGWDRGLYGGALGWVDAKGDGCLCVTIRCAEIHGKNATMYVGNGIVADSDPKEELAETRAKLGAILPALIAP

SEQ ID NO: 94986 - protein, 401 aa, Streptomyces nanshensis
  REGION 1..401: note = tr|A0A1E7LNV8|A0A1E7LNV8_9ACTN Isochorismate synthase OS=Streptomyces nanshensis OX=518642; GN = AN221_26475 PE=4 SV=1
MSTASQVATHVPPADPAHPAVGAATSLLDAYAPGDHFLATPGRTLLARGAGRQVPHDGRPLTERVDAALAEAVAAGQESPVVIGAIPFDHTAPAALHIPATVRSAPPLASDPLIALPAGSSATADWRIRPVPEPEVYGEGVAAAVARMWRGEFSKVVLARTLELTSDAPLDLPAMLQRLARRDPSGYTFALPTGPARTLIGASPELLVSRRGNQVVSNPLAGSTPRSDDLAEDVRRAATLLESVKDLHEHAVVVDAVHQALAPHCTDMTVPARPTLIRTATMWHLSTTVTGTLTSPDTSALDLAMALHPTPAVCGTPTQTARQVIAETEPFDRGFFTGVVGWGNAEGDGEWVVTIRCAEAEERTLRLYAGAGVVAASEPEAETAETGAKFRTFLSAVGAEL

SEQ ID NO: 94987 - protein, 428 aa, Streptomyces netropsis
  REGION 1..428: note = tr|A0A445NJM7|A0A445NJM7_STRNE Isochorismate synthase DhbC OS=Streptomyces netropsis OX=55404 GN=dhbC; PE = 4 SV=1
MTTVHHVADRPSEPGARADGRLTAVPGGVGQRIERPEDTVGAATSLLDAYEPARARFFASPTRTLLAHGTRTEVPHGGTPLARRVTETLDAELLAGNPAPIVVGAVPFDQSAPASLAVPQAVRWAPPLSEDPLIALPAAAPAAADWDIRPIPEPDVYGAAVAEAVRRMRRGDFSKVVLARTLELRSSRELDLPALLQRLARRDPAGYTFALPTGPGRTLLGASPELLVARRGGALIANPLAGSTPRSADLAEDVRRAAALLESEKDLHEHAVVVDAVRAALAPFCRTLDVPERPTLVRTAAMWHLSTTVTGELADTAVSALELACALHPTPAVCGTPTTTARDVITELEPFDRGNFTGMVGWGDASGDGEWVVTIRCAEARTEERTLRLYAGAGVVAQSTPEAETAETGAKFRTFLDAVGADHQESGR

SEQ ID NO: 94988 - protein, 400 aa, Streptomyces nitrosporeus
  REGION 1..400: note = tr|A0A5J6F3R8|A0A5J6F3R8_9ACTN Isochorismate synthase OS=Streptomyces nitrosporeus OX=28894; GN = CP967_01495 PE=4 SV=1
MSTSLRVPSSSPPLGAPGTATALLEAYRPGTDRFIATPRLTLLGSGSAAEVPRDARPVSERVRETLAARRLAGDSDPVVIGALPFSPDGTHSLAVPRTLRRAPALREDPLIALRGPDVEHAADWRIREVPAAAEYGRAVAAAVARMRAGEFDKVVLARALDLTSPHELDLPGMLSRLARRDPEGYTFAVPSGPGRTLIGASPELLVARRGGRLVANPLAGSAPRSGDLAEDVRRAAALLESPKDLHEHAVVIDAVREALAPFCTRLEVPERPTLVRTAAMWHLSTTLTGELADPESTTALDLASALHPTPAVCGTPTDVARAVIAESEPFDRGAYTGVLGWQDADGDGEWVVTIRCAEAEGRTLRLFAGAGVVAESSPAAETAETGAKFKTFLNAVGATL

SEQ ID NO: 94989 - protein, 381 aa, Streptomyces rimosus
  REGION 1..381: note = tr|A0A0M9XC26|A0A0M9XC26_STRRM Isochorismate synthase OS=Streptomyces rimosus subsp. rimosus OX=132474; GN = ADK43_35915 PE=4 SV=1
MGKATALLDAYTPGARFLGTPTRTLLAQGTHSEVPHDERPLPQRVAATLDAARAAGHGAPFVVGAVPFDQTAPAALTVPGSVRTAPPLTADPLIALPADPPAAAAWDIRPVPEPEVYGAGVAAAVERMWRGEFSKVVLARTLELTTPDPLDVPAMLQRLARRDPSGYTFALPTAPGRTLLGASPELLVSRRGDRVVANPLAGSTPRSDDLAEDVRRAAALLESAKDLHEHAVVVDAVHRALAPYCTGLTVPARPTLLRTATMWHLSTTVTGTLAAPDTSALELACALHPTPAVCGTPTDTARQVITDTEPFDRGFFTGMVGWGDASGDGEWVVTIRCAEAEERSLRLYAGAGVVAASEPAAETAETGAKFRTFLSAVGAEL

SEQ ID NO: 94990 - protein, 424 aa, unidentified
  source 1..424: note = Streptomyces rubellomurinus
  REGION 1..424: note = tr|A0A0F2TDE4|A0A0F2TDE4_STRR3 Isochorismate synthase OS=Streptomyces rubellomurinus (strain ATCC 31215) OX=359131 GN=VM95_20665 PE=4 SV=1
MHHAPAGTPAAAPAGPPAHAPDQAVIGAASGLLGQYRAATDEAFFASPTRTLLTSGAHARVPQDARPLAQRVAHALAEAEANAEARADAKAEAGTRSADSRRPLVVGAVAFDHDRRAELVVPALVRTAGALRDDPLIALPAPPADRVDWQLRPVPAPEAYGAGVAAAVERLRGGELSKVVLARTLELTADRPLDLPAVLQRLARRDPGGYTFAVPAGPGRTLIGASPELLLSRRGTAVLANPLAGSVPRSDDLGEDVRRAAALLESPKDLHEHAVVVDAIRTALAPHCRTLDVPERPTLVRTAAMWHLATTISGELADPAVTALDLATALHPTPAVCGTPTDLARRVIGEVEPFDRGLYTGMVGWQDAAGDGEWVVTIRCAEAEQRTLRVYAGAGVVDRSRPEAELAETSAKFRTFLDAAGVPR

SEQ ID NO: 94991 - protein, 317 aa, Streptomyces sp.
  REGION 1..317: note = tr|A0A014N263|A0A014N263_9ACTN Isochorismate synthase OS=Streptomyces sp. PRh5 OX=1158056 GN=Z951_12020; PE = 4 SV=1
MAFPFQRQEPIRLAVPARTLSLEETPDRRRLLASVPTPSAKSGEPGAFALRPSEPPEQWCGSVADAARAVRRGELRKAVLARRIQMECDTDIQASVVLRRLAHSFPSAYLFSAFGLVGASPELLLAKRGRMVESRALAGTIRRGGDAESDRRLASWLQESGKNQEEHRVLREAVLDALTPSTTWIKANERPETLKLANVQHLMTRVRAELKADHPPFLRLAAMLHPTPAVCGWPRDKAYEVIERLEGWDRGLYGGALGWVDAEGNGCLCVTIRCAEIHGKNATMYVGNGIVADSDPKEELAETRAKLGAILPALIAP

SEQ ID NO: 94992 - protein, 159 aa, Streptomyces varsoviensis
  REGION 1..159: note = tr|A0A0L8M026|A0A0L8M026_9ACTN Isochorismate synthase (Fragment) OS=Streptomyces varsoviensis OX=67373; GN = ADK38_46420 PE=4 SV=1
MGLATGLLDAYAPGDARFFASPTRTLLAHGVRAEVPHDERPLPRRVAETLEARRAAGDPAPLVVGAVPFDQDAPAALAVPETARWAPPLAEDPLIALPPAARWQIRPVPEPAVYGDAVAEAVRRMKRGDFSKVVLARTLELTAPAGTDATAAPDLPGLL

SEQ ID NO: 94993 - protein, 401 aa, unidentified
  source 1..401: note = Streptosporangiaceae bacterium
  REGION 1..401: note = tr|A0A3A4AFH2|A0A3A4AFH2_9ACTN Isochorismate synthase OS=Streptosporangiaceae bacterium YIM 75507; OX = 2339229 GN=D5H75_25425 PE=4 SV=1
MAVRSVEVPDPGDLLTRLPVPSPYAWIHRGDGLVAWGEAARLTLPPGEDRFERARRWLDRVLGGADIDDRVGLPGSGPVAFGSFTFDPRSAGSVLVVPRVILARRDGRTWCTTVGDAQDAARLVHPLLDPGAVRWDDDADCARHYEQAVAQAVQEIRADKLGKVVLARDLRARAEHPIDARILLNRLSTRYPECYTFSCAGLVGATPELLVRHTGQAVESLVLAGTTRRGATPEEDAALGAALMNSAKDRSEHVYAVESVRAALTPLTRRLDVPEEPELLVLPNVQHLASPVSGELADGSSVLDLVAALHPTAAVCGTPSDVAMEAIRGLEGMDRGRYAGPVGWIDARGDGEWGIALRSAEIDGHDARLFAGCGIMADSSPAAELAEAQAKLRAMQDALEG

SEQ ID NO: 94994 - protein, 406 aa, Streptosporangium nondiastaticum
  REGION 1..406: note = tr|A0A2P7PLL7|A0A2P7PLL7_9ACTN Isochorismate synthase OS=Streptosporangium nondiastaticum OX=35764; GN = B7P34_21970 PE=4 SV=1
MTTAHHVADRPGGSEPGAPVRGDTVGAATSLLDAYEPGRARFFASPTRTLLAHGVRAEVPHGTAPVAQRVAETLAARVRAGDAAPVVVGAIPFDQAAPAALAVPEAVRWAPPLAEDPLVALPAAAPVAARWDIRPVPEPAGYGAAVAEAVRRMRRGDFAKVVLARTLELSSDRDLDLPALLQRLARRDPSGYTFALPAGPGRTLLGASPELLVSRRGGTLVANPLAGSTPRSADLAEDVRRAAALLESEKDLHEHAVVVDAVREALTPYCRSLHVPERPTLVRTAAMWHLSTTVTGEPADPAVSALELASALHPTPAVCGTPTTTARDVIGELEPFDRGFFTGMVGWGDANGDGEWVVTIRCAEAEERTLRLYAGAGVVAQSSPEAETAETGAKFQTFLQAVGVDQ

SEQ ID NO: 94995 - protein, 428 aa, unidentified
  source 1..428: note = Subtercola vilae
  REGION 1..428: note = tr|A0A4T2C703|A0A4T2C703_9MICO Isochorismate synthase OS=Subtercola vilae OX=2056433 GN=D4765_05325; PE = 4 SV=1
MLIPMLDSRDPLLWIRKGQGFAGIGTALRLEFSGENRISDAGAAWREIAAAATVVDPLKTPGTGLVAFGAFAFSAQSAEKSVLIVPRVLVGKRDGVHWMTTVHVLHPDQVIPGEAEAGHPEPTRSGTQPEARAEARPTPPMSRPEPTLPPATPLGSEYRISLLPGAAKPDTYRAAVEEAVSRITHGDLEKVVLARDLVGHLPDGSDLRRVITDLALGYPDCWTFAVDGLIGSSPETLVSVSHGTVTARVLAGTISRGRDAEADHDQAVALATSAKDLDEHRFAVASVMSALTPHARTLAASEIPFTLKLPNLWHLASDIEGTLGDGSTSLNLIASLHPTAAVAGTPTKDALRLIERLEPFDRGRYAGPVGWIGADGDGEWAVALRCAQVDADGYITAYAGAGIVSESDPEREFLETRMKFRPMVEAFA

SEQ ID NO: 94996 - protein, 342 aa, Succinatimonas hippei
  REGION 1..342: note = tr|E8LJ76|E8LJ76_SUCHY Isochorismate synthase; OS = Succinatimonas hippei (strain DSM 22608 / JCM 16073 / KCTC 15190 / YIT 12066) OX=762983 GN=HMPREF9444_00774 PE=4; SV = 1
MQDNKIHFLSIQKNNNSKETFVIAPFNPDDKPLYLNVCMHTQGDIKHICNFIHKNYSHLNFEKTLNEQTNNKEPLSQEKINSFCKTANEKAYKDYCSAFSKFKQELVKENFAKLVLSRPYFCPLKKDLSHSFLDLCKTYPNAFCYMAKVGSKGIFMGASPEILASVADNELKTMSLAGTMAKSLNNHYEWSSKNIKEQQLVTDFIISRIKPYAKSISAAGPVTHDAGPVVHLLTQITAVLNDGIDKHSAAASLHPTPAVCGLPKNAALKFIVKNEGYKRNYYSGYIGLISPNNLHLFVNLRCMFFNGQFAVLYAGGGLLKSSDLEDEWQETENKLKTLRDLI

SEQ ID NO: 94997 - protein, 320 aa, Sulfurospirillum multivorans
  REGION 1..320: note = tr|A0A5B9TUI2|A0A5B9TUI2_SULMU Putative para-aminobenzoate synthase OS=Sulfurospirillum multivorans OX=66821 GN=SMN_2255 PE=4 SV=1
MNIEFASKLNAFGKARTPFFFVIDYAAKQFEVFALDAVPSGILYQLESQSNASKAFTCKDVSWSKTPPSKEHYFAQCDAVIEAIKAGNTYLLNLTAPTNVEFSGSLETLFYTANAPFKLCYHEHFVCFSPERFVQLKNNQISTYPMKGTIDASIPNAEEMILNDEKEKAEHVMVVDLLRNDLSMVSREVRVEQFRYVETIQAGTKELLHVSSKITGKLDENWHENVGTIIAKLLPAGSISGTPKRSSVEIIERLEGYDRGYFTGIFGVYDGKSLDSAVMIRFLEKTKEGCVFKSGGGITLLSDAQKEYDELCDKVYIPVF

SEQ ID NO: 94998 - protein, 465 aa, Synechococcus sp.
  REGION 1..465: note = tr|A0A424HP96|A0A424HP96_9SYNE Isochorismate synthase OS=Synechococcus sp. TMED20 OX=1986597; GN = CBB80_010960 PE=4 SV=1
MTADHRFSTLLDAARSGWEQRSCEDSLLSLALPIEGIDPLPALPHLANTDAFRFLWDCAPGLSLAASGRCQHLELAGLRRFELAQRFCDVTLGRLIDATPATHPQARAKVLLAFSFFEQSDERALPSSVPSVQAVLPRWQLSRQGQRGWLRINGTVSDIADARELAEQLWLKTRELEAHPGGPPLQTSAPIPIPGRLAAKPWQDRYRQALDRALELVNEAELHKLVLAVRQTIDLEEPLDTLPLLQRLRHQQAGSCRFLWQRQTGDAFFGASPERLLCLRGDNLRIDALAGTAGRGDDGSQLLRSDKDRREHELVVETITGRLQQMGLNPWHRPHPQLARHGLLTHLHTPITADAAGRSALALAEELHPTPAVAGLPRREAMAWLRALEPFERGGYAAPIGWIDSAGDAELRVAIRCGHARGHRLDLTAGAGLVRGSIAERELQEVGLKLAVLANQLELRSALWQ

SEQ ID NO: 94999 - protein, 443 aa, Synechocystis sp.
  REGION 1..443: note = tr|A0A068MZB1|A0A068MZB1_SYNY4 Isochorismate synthase / Menaquinone-specific isochorismate synthase; OS = Synechocystis sp. (strain PCC 6714) OX=1147 GN=menF; PE = 4 SV=1
MSPGQVCLWSFTEYLDDVDPLAVFGALDLQEQVHFYGENPQRQETILAFGICQSLRISGKYRFSLAQQFAEDCFQRLVSIGNAQGRSQRPYIFCGFSFFDRTPNPSPFANSFLFLPQIQLVKAPHHCLLSWQISLDSSTNIAELVDFIGQMLSAIRRVNPIRDTLPPSLNGNPPRLTKTEVAQLSTAIASSLGEIDQQRLSKVVLATALDLDYGCQFSTAHCLQRLRQQYGDCHLFSWGNGKGDCFVGASPERLLSLHNQQLITDALAGSAPRAADVQGDRRLGQQLLHNPKELREHQAVLDYLLQRLTALGLTPQASSLKLLKLANIQHLWTQIQAPLPPHIHPLALVEQLHPTPAVAGVPVAIAEDLIRRHETFDRNLYAAPLGWLDSEGNSEFIVGIRSALLSRNRARLYAGAGIVAGSDPLKEVAEIELKLQTLWRSLI

SEQ ID NO: 95000 - protein, 453 aa, Syntrophus aciditrophicus
  REGION 1..453: note = tr|Q2LXF2|Q2LXF2_SYNAS Isochorismate synthase MenF; OS = Syntrophus aciditrophicus (strain SB) OX=56780 GN=menF; PE = 3 SV=1
MKSDFLFYPLFREEIDRLSRNSGRKEAGYLLRIENRTELSDPILDIILSCQIPEKFYYSARDDLFELGGLGSALNIEAAGEDEILNGFSWLWDADETIPVFGGFSFDEEPSSPEWEPFGRFRFTLPLVEIRRSPEGVRISVNCVNKKEMSRAQVCRELADALQSLDALTRNFPKEFQPAVADRQLIPDKPQWNRMIKKALRTIREGELKKIVLARKKVITHRDLWNPAQIIASLSRIQENSFTFFYQVDDGIAFLGRSPERLFRMQNGQILTEAIAGTRPRGKTPFDDQRLEAELLSSPKELEEHRFVAGFIEAGMNRLCADVRMESREEILKLQNVQHIVTRFSGRAHSSFSPLSVAAAFHPTPAVGGLPQEEIRSCLRRHEPFRRGWYAAPIGWMNRRNAEFAVGIRSALVNGKALHIFAGAGIVSQSNAHAEWSETEKKMDNFAAIMKER

SEQ ID NO: 95001 - protein, 454 aa, Syntrophus gentianae
  REGION 1..454: note = tr|A0A1H8A0L6|A0A1H8A0L6_9DELT Isochorismate synthase MenF OS=Syntrophus gentianae OX=43775 GN=menF; PE = 3 SV=1
MKSEFFFYPLFQEEIDRLVQNPGRKEARYLVRIEKEMVLTDPILDLILSCQTPGKFYYSAKDDLFELGGLGNALVIEAASGDEVLEGFRRLWNRDETIPVFGGFAFDAEEEIAPEWGPFGRYRFTLPLIEISRSRKGARICVNYINKKRLPREQVLREIADSLQSLDALPRLSPTAGQPALADKALIPEKPQWNRMIKKALRTILEGDLKKIVLARKKVFTQKDRWDPVQIVAALAGISEKSCLFYYQIEDGVAFLGRSPERLFRMHNGTLLADAIAGTRPRGKNPFDDQRLEAELLNSPKELEEHRFVAGFIEARMHQLCTDVKVESREEILKLKNVQHIITRYSGRSQKNFSPLAIAEAFHPTPAVGGFPQEEIRSCLRRYEPFRRGWYAAPIGWMNRRNADFAVGIRSALVSGKTLHIFAGAGIVSQSNPHAEWNETEKKMDNFAAILGEV

SEQ ID NO: 95002 - protein, 454 aa, Syntrophus sp.
  REGION 1..454: note = tr|A0A1V5E730|A0A1V5E730_9DELT Isochorismate synthase MenF OS=Syntrophus sp. PtaU1.Bin208 OX=1811713; GN = pchA PE=3 SV=1
MKSELLFYPLFQEEIDRLVQNPGKKEARYLVRIEKVMALADPNLDLILSCRTPEKFYYRAKDDLFELGGLGSALVIEAPSGGEVLEGFRRLWDRDETIPVFGGFAFDAEEEISPEWEPFGRYRFTLPLVEISRSPEGARICVNYINKKKLPREQVLREMADALQSLDAPPRLFPTAGQSTLADKALIPEKPQWNRMIKRALRSILEGDLKKIVLARKKVFTRKDRWDPLQIVAALADISEKSFLFYYQVEDGIAFLGRSPERLFRMQNGTLLADAIAGTRPRGKNPFDDERLEAELLNTQKELEEHRFVAGFIETRMHQLCTDVRVESREEILKLKNVQHIITRYSGRSQQNFSPLAIAEAFHPTPAVGGFPQEEIRSCLRRYEPFRRGWYAAPIGWMNRRNADFAVGIRSALVNGKSLHIFAGAGIVSQSNPHAEWNETEKKMDNFAAILGEV

SEQ ID NO: 95003 - protein, 383 aa, Tannerella forsythia
  REGION 1..383: note = tr|G8UI39|G8UI39_TANFA Isochorismate synthase; OS = Tannerella forsythia (strain ATCC 43037 / JCM 10827 / FDC 338) OX=203275 GN=BFO_3201 PE=4 SV=1
MNFYKKYLPVGMKEAVTHCLDSFVPFYLYRLPEREGGRLSFGVSLSGRIECKTADFSVPGFVAAPFDSEEEAYFIPGEFECGGDLTDRAVRNLKDAVFSGIRMPCPESGDMDKEAYRTAFEEIMRRIDSGVLEKVVLSRTLIFKRGDSGFSDVFSYWELLRRAYPHAFVFLYFIPGKGVWAGASPELLLDYTKGRVKTMALAGTRPVSFEGELLKPWTQKEIREQGVVRDYIREVLENHCRSVEMSETRTFMAGNICHLCTDFTALTGDGLESLLKALHPTPALGGFPRKEALACIREVEVHERKFYGGYLGPVGKDVARLYVNIRSMELFPGAFRLYVGGGINGDSVFEDEWEETSDKAATLLNVLGIHSVGDKANFNDNAR

SEQ ID NO: 95004 - protein, 397 aa, Tatumella ptyseos
  REGION 1..397: note = tr|A0A085JQA1|A0A085JQA1_9GAMM Isochorismate synthase OS=Tatumella ptyseos ATCC 33301 OX=1005995; GN = entC PE=4 SV=1
MVEMEQFENPSVYDFPSLSDRFLFTSRWKSLLTDGCFRRLTSPLTEDGTPGARFSVQAEAALREARLAGIRHPVIAGAIPFDPCQPSELFIPESYRFIDRDHLVRAAKTSPDFAGGEVTGSRLIPEQPAFMAMVSQAIEAMERGEADKVVLSRLQEICSRDAIDMTGLMSQIVRQNPDNYHFHLPLSCGATLLGASPELLLRKEGANFYSCPLAGSAGRSADPAEDTLRGRDLMNSEKDRREHQLVTDDMRRTLQPVSKTLSVPDVPHLLTTSTLWHLATDIRGTLQHTDTSALSLAALLHPTPALSGYPHRQALDLIRTLEPFNRKLFGGMVGWCDDQGNGEWVVTIRCATVKEKTVTLFAGAGIIPASDPYSEWRETGIKLNTMLRAFGLERTER

SEQ ID NO: 95005 - protein, 342 aa, Tenacibaculum jejuense
  REGION 1..342: note = tr|A0A238UCK3|A0A238UCK3_9FLAO Isochorismate synthase OS=Tenacibaculum jejuense OX=584609 GN=menF PE=4; SV = 1
MSLQDNLPFVVYRKPNSKQVQSFFQKNTTLFFSNEFDEEGFVFAPFDNTKSSILIPLNESEVIHENLDDLSDNSKVVFESDSLKNKADIHIDLVKDAINAIKNNQFKKVVLSRDEEVLLKDFDAITVYQRLLVNYPTAFCYLWFHPKVGLWMGATPETLLDIKDNEFSTMSLAGTQIYNPEKETSWGEKELDEQQLVTDYITEKLREESEYLTVDNLETIKIGNLLHLRTKISGRAKYDIKSVIKVLHPTPAVCGFPKEESKSFILKNENYDRSFYTGFLGELNLTENNTRFSSLYVNLRCMQIKEDKAILYIGGGITKDSDPEKEWEETKVKSLAMKRVLS

SEQ ID NO: 95006 - protein, 345 aa, Tenacibaculum litoreum
  REGION 1..345: note = tr|A0A3R9E980|A0A3R9E980_9FLAO Isochorismate synthase OS=Tenacibaculum litoreum OX=321269; GN = EI424_08420 PE=4 SV=1
MSIFLNIKEAFNEELPFVTYRKPNSSIIKGWFQQNNDVITSENYNESGFIFAPFDSREKAILIPRNQSTYIEEETTVGDTQTNNNNHAPDTASEENHIQLVEKGIAAIKNQQLKKVVLSRKEKIELSDFSLIDTFQKLLNNYPTAFVYVWYHPKIGLWLGATPETLVSIKDKNFTTMALAGTQVYNGTTNVTWQPKELEEQQFVTDYITDRLSDISLNITTSGVETIKAGKLLHLRTILNGKLKTNTASLIKSLHPTPAVCGMPLEASKQFILNNENYHRSFYTGFLGELNTDNKESHLFVNLRCMEVSNNTVYIYVGGGITNDSNAIKEWQETVAKTTTMKKVL

SEQ ID NO: 95007 - protein, 354 aa, Tenacibaculum maritimum
  REGION 1..354: note = tr|A0A2H1EBA1|A0A2H1EBA1_9FLAO Isochorismate synthase OS=Tenacibaculum maritimum NCIMB 2154 OX=1349785; GN = menF PE=4 SV=1
MNIFKHITTAYQKQLPFVVYRKPSSERIAGFFQKTDELHFANDYTEEGFVFAPFNNTEQSILIPKKKADYIEETIVVNLENTSIKSVDTVTKSTLAAQKKHVDLVHKGIKAIHKNEFKKVVLSRKESISLSNTDFINIYQKLLHTYPLAMVYVWFHPKIGLWLGATPETLLKIKGNTFETMSLAGTQLYKETLDVTWSQKEIDEQQFVTDYIIEKLQEKEIPITASSPTTVQAGSLVHLCTKITGTFHFKNTELINALHPTPAVCGLPKKRAKTFILEQENYHRSFYTGFLGELNLKPNHATIKESDLYVNLRCMQLKNAEAHIFIGGGITKDSSPEKEWQETVSKANVMKKVL

SEQ ID NO: 95008 - protein, 345 aa, Tenacibaculum sp.
  REGION 1..345: note = tr|A0A3Q8RTP0|A0A3Q8RTP0_9FLAO Isochorismate synthase OS=Tenacibaculum sp. DSM 106434 OX=2358479; GN = D6T69_12820 PE=4 SV=1
MSIFLNIKEAFNKELPFVTCRKPNSSIIKGWFQQNNDLITSENYNESGFIFAPFDSREKAILIPRNQSTYIEEETTVGDTQTNNNDHAPDAASEESHIQLVEKGIAAIKNQQFKKVVLSRKEKIELSDFSLIDTFQKLLNNYPTAFVYVWYHPKIGLWLGATPETLVSIKDKSFTTMALAGTQVYNGTTNVTWQPKELEEQQFVTDYITDRLSDISLNITTSGVETIKAGKLLHLRTILNGKLKTNTASLIKSLHPTPAVCGMPLEASKQFILNNENYHRSFYTGFLGELNTDNKESHLFVNLRCMEVSNNTVYIYVGGGITNDSNAIKEWQETVAKTTTMKKVL

SEQ ID NO: 95009 - protein, 462 aa, Tenuibacillus multivorans
  REGION 1..462: note = tr|A0A1H0FRM3|A0A1H0FRM3_9BACI Isochorismate synthase MenF OS=Tenuibacillus multivorans OX=237069; GN = menF PE=3 SV=1
MLQTKQLQIYEQLSMAKEQLNEQQPTQQVSVVEPIDPINPVDYFTAFEHEQTHRMFWKDTTDTTYYVGIGVHKVFQANQDRFATIKNQWKRFLNDIMISDDVKKETGPLLFGGFSFNENIKGEKWANFKPGQMVLPKMMLTVNHDSYYMTYNVQLSQETDLDLLVSELEGWHDKVQETKEYDANTHSLQSLNSLDYGEWEKLINEAVETIKRGDLGKVVLARELNAKFNQDINISVVLKRLELQQSDSYIFIFDQGDETFISATPERLVRVQGRDLLSTCLAGTTGRGQIESEDDLLAWQLLNDEKNLNEHDYVVRMIKDAIEPLSETVDIPEKPVIYPLRALQHLYTPVTATLKSTTSIFDLIERLHPTPALGGEPRDKAIKYIEEEEPFERGWYAAPIGWIDHEGNGEFAVAIRSGLIQHDQATLFAGCGIVADSVPDAEFEETKLKFTPMLDALGGVTR

SEQ ID NO: 95010 - protein, 472 aa, unidentified
  source 1..472: note = Tepidibacillus decaturensis
  REGION 1..472: note = tr|A0A135L5C1|A0A135L5C1_9BACI Isochorismate synthase MenF OS=Tepidibacillus decaturensis OX=1413211; GN = menF PE=3 SV=1
MITTNKNIYPKWIYDGIKNSQQTGRAFIISYVKKIEPIDPLHFFRNGAELFFGQRLFWSDPSGEMSIVGVGNIYVIEAEKEMRFQTVKEKWTKLLDQIILNDESEGSVIGTGPLLLGGFSFDPYKPKSSLWQEFKDGMMFLPAFMLTHLRGDSWLTINLQVAEDDDPEQTAMKLENELNTLLKEKEESLDCEKDQSYKTMIQEVEPESWIHSVRKATHQIQQGRLEKVVLARELQLQATDTILAEDILYRLREQQPASYIFAIENGEKCFIGASPERLVKKEGNQLLTTCLAGTIRRGKTIEQDVELGQQLLHDRKNRYEHDLVVQMIRSAMEEGCSKVVTPSEPILYKLKDVQHLYTPIVGYSDSTSILDMVERLHPTPALGGYPREQAMELIRKEEILDRGWYGAPVGWLDRQGNGEFVVAIRSGMIYHHLASLFAGCGIVEDSIAESEYEETMIKFKPMLTAIGGKINE

SEQ ID NO: 95011 - protein, 394 aa, Teredinibacter turnerae
  REGION 1..394: note = tr|C5BUB6|C5BUB6_TERTT Isochorismate synthase DhbC; OS = Teredinibacter turnerae (strain ATCC 39867 / T7901); OX = 377629 GN=dhbC PE=4 SV=1
MSVTFAESRLSAHAIPTASNFTFCSSHRKLHTTGIAENLHLPIFEHNTTQRFTKSLRSAFQRAHANGISNPIVVGAIPFDLTQPCSLFIPVESHFGTTPIVNQFSKRDPIEIVNRRSFPEEARYKQSVKQAIANFQLSDIRKAVLSRVLELDLNTQLPANTLFHSLQHQNPTGYHFSVPLEDGGQLVGVSPELLIRKEAEWITSNPLAGSTRRLRNADDDTAAALALQSSHKDLYEHRLVIEEINRVLQPFCSELDIPAAPSLLNTETMWHLSTLIRGRLSNANISALDIASALHPTPAVCGYPTPLAHKLINLVESFDRGLFAGMVGWQDSDGNGEWAVTIRCGIVRGNQVSLFAGAGIVEDSCPESEWAETQAKLQTMLKALPIQANAEAAQ

SEQ ID NO: 95012 - protein, 418 aa, unidentified
  source 1..418: note = Tessaracoccus rhinocerotis
  REGION 1..418: note = tr|A0A553K5J8|A0A553K5J8_9ACTN Isochorismate synthase OS=Tessaracoccus rhinocerotis OX=1689449; GN = FOJ82_03660 PE=4 SV=1
MILESGSNRLRATTVAIDDPGPLQRFLPLTGPSTAFIRKGEGIITIGEVERFETDYPDAADVWWDEVASYIDHDSELPGAYGTGPLAVGSFTFDPDASEERSVLIVPKVIIGRRAGQFWMTKLTGGRMDYELPDVGEAIVPPTGVTLDDGPVPPAEWGRIVAEVVGLIRADEVSKVVLARKVRARSETPFDARAILNRLLHRYPTTWAYMVDGLVGATPELLIRRQGGLATSRVLAGTISLDPDHTDPLARAADLARSHKDISEHEFAVESIARALEPFCSAMNVPESPSVLPLPNVLHLATDITGVTDPDTSALALAAALHPSAAVCGTPTFLAREVIGELESMDRGRYAGPIGWVDARGDGEWALALRGGQILRDDPREIHLFAGAGVVADSEPEAEIAETNAKLLPMLQALGLSD

SEQ ID NO: 95013 - protein, 418 aa, Tessaracoccus sp.
  REGION 1..418: note = tr|A0A3M0G281|A0A3M0G281_9ACTN Isochorismate synthase OS=Tessaracoccus sp. JDX10 OX=2479848; GN = EAX62_13550 PE=4 SV=1
MSLDFSTKRMRATTVAIPDPGLLQRFLSASGPTSAFIRRGEGFVALGEVARFETDYPDAADVWWAEVADHIDHDSELPGAYGTSPLAVGSFTFDPDRSEERSVLVVPEVVIGTRGGQSWMTTIGPRSRSLELPPSGERLVAPTHLDLLEGSMSERIWMDIVGEVVALIRTGEVDKVVLARDLVVKAGGPLDARWLVNRLVNRYPTCWTYLVDGLVGATPELLIRRQGGLATSRVLAGTVSLDPQNTDSLVKAAELATSSKDVAEHEFAVESVARALEPYCSAMNVPESPSILRLPNVLHLSTDITGVTDPGSSALALAAALHPSAAVCGTPTFAARDVISELESMDRGRYAGPVGWVDSFGDGEWAIALRGGQIKPETPEQIQLFAGCGLVADSDPAAELAETKAKFLPMLQALGLAD

SEQ ID NO: 95014 - protein, 428 aa, unidentified
  source 1..428: note = Testudinibacter aquarius
  REGION 1..428: note = tr|A0A4V2W2G9|A0A4V2W2G9_9PAST Isochorismate synthase MenF OS=Testudinibacter aquarius OX=1524974; GN = menF PE=3 SV=1
MDCWQQIKQQLRQRLNAHDFSAQNSAISQYQLEFTPDSASDDVLAWLKGQCCYPQFFWQARESATQCVALGQVNYFTELAAAQAFLTAYPMQQLQLVGGLTFEGEAHFYLPRLWLEQRAQTWRITLTLSADDQQSAVEAFLQGLSPPLPLKQVQTTLRLETQNYSENEWQALVGEALAQIEQGHFTKVVLAQKKTYRSDTAVNPYDLVAQARVQHADCYYFLWAQTPEQVFLGASPERLYQRDRQRLITEALAGTAVSSDDPQQTEQQQQWLLQDRKNIHENRLVVEDICAKLANFSQHLDIESLTSRKLSYVQHLVRKIAAKLYPDADDSTCLSAIHPSAAVGGLPDRAALNFIATRQNFRREWYAGTLGVMSLANSEFCVAIRSTLLNQDKIMIFTGAGIVAGSVPLLEWQEIERKAAGILLLFPA

SEQ ID NO: 95015 - protein, 260 aa, Tetrasphaera australiensis
  REGION 1..260: note = tr|W6K2S2|W6K2S2_9MICO Isochorismate synthase dhbC; OS = Tetrasphaera australiensis Ben110 OX=1193182; GN = BN11_1930001 PE=4 SV=1
MGEAVERITSGALDKVVLARSLVARAEAPIDPRFLLRRLADSYDNTWVFAVAGLIGATPEMLVRLDRGLASSRVLAGTIRRTGDDAHDLALSASLARSSKDLEEHEYAVRSVADALGRHCASMNVPESPFVLHLPNVMHLATDVAGAVEDGATSLELAASLHPSAAVCGTPTATADALITELEGLDRGCYAGPVGWMDAAGDGEWGIALRSGQLDPADPCQISIFAGCGIVAGSDPEDEVAESDAKFLPMRDALTAAPTA

SEQ ID NO: 95016 - protein, 164 aa, Thalassiosira pseudonana
  REGION 1..164: note = tr|B8C734|B8C734_THAPS Salicylate biosynthesis isochorismate synthase-like protein (Fragment); OS = Thalassiosira pseudonana OX=35128 GN=THAPSDRAFT_263409; PE = 4 SV=1
FLGCTPERLFRIKSEDQNRVALAGTRIRGLTPSADAELLRELLSSKKDMLENEITGKFISDALQELEDSGWFFVRRLRHLQHICQIFEGRLSKSANVIDVSRSLLKGLHPTPAVCGDGPSPALDFIRTFETTASFDRGFYAGPFGYIGHDSADIVVAIRSALLT

SEQ ID NO: 95017 - protein, 463 aa, Thalassobacillus cyri
  REGION 1..463: note = tr|A0A1H4G5Z4|A0A1H4G5Z4_9BACI Isochorismate synthase MenF OS=Thalassobacillus cyri OX=571932 GN=menF; PE = 3 SV=1
MIHTEAATLDEVIDQALNKAVQTNQKQLVSIVEHIKPIDPFVFHAGAAVMNEPRLFWKSADEDVVMAGVGAAIRLSSAKDDRFQNIQDQWKQLMEHAYRFDRHEQKGTGPVAMGGFSFDPRKENTELWSSFGNNQLEIPSYLLTIVENEHYFTINAVIYPDDHKEQLKFQWEEAKSALLQKRNHTFIAPEILERKEIEPDEWKRLVKKATEDIEAGVLDKVVLAREIRLKFDENVDISQVLQHLDDTQTNSYIFAFESEGAQFVGATPERLVKVENQQLLSTCLAGTIPRGGTADEDVKLGQELLEDGKNLEEHQFVVRMIRDAIVACSEEVDIPDRPVLYPLKNLQHLYTPVRAQLKQEHTLLDVVARLHPTPALGGLPQEEALAYIREFEPLDRGWYAGPVGWFDSKQNGEFAVAIRSALVNKNKASLFSGCGIVKDSDPEMEYEETAIKFTPMLAVLGGA

SEQ ID NO: 95018 - protein, 406 aa, Thalassolituus sp.
  REGION 1..406: note = tr|A0A558NKC4|A0A558NKC4_9GAMM Isochorismate synthase OS=Thalassolituus sp. C2-1 OX=2597518; GN = FOT50_11555 PE=4 SV=1
MNNPVSGIEENSSHPVLASGISAHPDVENACFFYASSQGCIQARGIAEAVCQPVGVDAVQRLQFLRSVDSALNRARAYGQKRPLVMGCIPFDRTQPATLYVPRESEFLTEAPVLPVPDLAIRSRVISCDSVPGEQRFRQSVEQAVANFRLSDIRKTVLSRVLNVDLDRPLDAGSVFQRLRAQNPSGYHFRFPLADGSELIGASPELLLRKQGRKIMSNPLAGSARRRADATEDRQVSEQLLRSAKDAYEHKLVIDDIRQVLSPWCEELDIPDAPSLISTPAMWHLSTCIHGQVNDATMNPLKIATELHPTPAVCGSPTAQAYKLIQLIEPYERGPFAGMVGWCDGEGNGEWVVTIRCGRITANRIQIFAGAGIVADSSPESEWAETRAKMQTMLNALDADFSGVTL

SEQ ID NO: 95019 - protein, 609 aa, Thermaerobacter sp.
  REGION 1..609: note = tr|A0A371Z9A2|A0A371Z9A2_9FIRM Isochorismate synthase OS=Thermaerobacter sp. PB12/4term OX=2293838; GN = DYI95_04435 PE=4 SV=1
MTSLAREVPHLASLTGPVSRDLDRLHARARDQARRGRRPSVVSFTVAAEDLDPIALFEGAAILTRERALWSAPGGTMAMVALGAAAVLEAGPGVAAESEAAGAGPAGPLAAIAPALASAWQALCEGALIDAPHGVWGTGPVVVGGFAFDPQEPADLLWAGFPAARFVLPELLVTRTGGETWLTFNRVVVPGVGTEAGTAAGTSAADGAGEGAGWIFPGGIRLHVPAAATTAAGERGRRWLSLLAVASTAGRRPGSRGTDPREPAGAPGAGGPGKAAAAAGGPAGSRPAGAGGLGAEPGAPGPRCEAGGRGGPGSSARPSGAGGAPSLIGARAVPGREAWEAMVRAALDAIGRGELAKVVLARRLHLRAGAAFDPGAALRRLQAGYPECFVFAVARDRTVFLGATPERLVRLRDRRVETAAVAGSTARGATPEADAALARELLASPKEREEHALVVRMLRDTLGPVCRVLDVPAEPRLLQLQNVQHLYTPITGVVDGATVPELVARLHPTPALGGWPRERALEFIRRWEGRTRGWYAAPLGWFDHRGEGEMAVAIRSGVVRGTEAWLFAGCGVVAGSDPGREWQETALKLQPLAAALGVEPGATEVDHGG

SEQ ID NO: 95020 - protein, 612 aa, Thermaerobacter subterraneus
  REGION 1..612: note = tr|K6Q379|K6Q379_9FIRM Isochorismate synthase family protein OS=Thermaerobacter subterraneus DSM 13965; OX = 867903 GN=ThesuDRAFT_01241 PE=4 SV=1
MTPLAREVPRLASLTGPVSRDLDRLHARARDQARRGRRPAVVSFTVAAEDLDPIALWEGAAILTHERALWSAPGGTMAMVALGAAAVLEAGPGPDAAAGPEAAGAGPAAPLAAIAPALASAWQALCEGALIDAPHGVWGTGPVVVGGFAFDPQEAADSLWAGFPAARFVLPELLVTRTGGGTWLTFNRVVVPGVVTAAERGAGTPAAAGAGGEGAGWVFPGGIRLRVPAAATTAAGERGRRWLSLLAVASTAGRRPGSGGTDPRGPAGAPGPGGPGKAEAGPGGRAGLQLAGAAGLGAAPGAPGWPGSAGGREGSGSSARPHGAGGFPSLLGARAVPGRDEWEAMLGAALDAIGRGELAKVVLARRLHLRAAAAFDPGTALRRLQAGYPECFIFAVARDRTVFLGATPERLVRLRDRRVETAAVAGSTARGATPEADAALARELLASPKEREEHALVVRMLRDTLGPVCRVLDVPAEPRLLQLRNVQHLYTPITGVVDGATVPELVARLHPTPALGGWPRERALAFIRRWEGGSRGWYAAPLGWFDHRGEGEMAVAIRSGVVRGPEAWLFAGCGVVAGSDPGREWQETALKLQPLAAALGVEPGAPEVDHGG

SEQ ID NO: 95021 - protein, 393 aa, Thermobifida cellulosilytica
  REGION 1..393: note = tr|A0A147KK72|A0A147KK72_9ACTN Isochorismate synthase OS=Thermobifida cellulosilytica TB100 OX=665004; GN = AC529_05695 PE=4 SV=1
MPRQRVAAPAPTVTELVAAYQPRDFLLTSASGTLLGSGALATVTGIDELADVLSRVGTDTGQAAVAVGALPFDRDAPAHLVVPETVRRGPAPEPAAAPAPRRSPLPGAWKAVPVPDPADHATAVKRAITLMTDPVAPELRKVVLARCLKLTGTCAADVAAVVANLVRADPVGFTFAADLPSRDAAPRTLVGASPELLVAKHGRSVVSHPLAGSAPRHPDPVQDREQAAALLSSAKERAEHAVVVEAVAEALRPYCRRLDVPEEPWTVTTATMWHLATRITGELRDPHTPSSLLARALHPTPAVCGSPTDRAYAAIAEIEPFDRGFYTGAVGYTDTAGDGEWVVTIRCADIHGSTVDLFAGGGIMPDSDPEAELAETTAKFRTLLRALGVDQTR

SEQ ID NO: 95022 - protein, 393 aa, Thermobifida halotolerans
  REGION 1..393: note = tr|A0A399G6X9|A0A399G6X9_9ACTN Isochorismate synthase OS=Thermobifida halotolerans OX=483545; GN = NI17_00805 PE=4 SV=1
MPRQRVVDPAAAPTELLDSYRPRDFLFCSASGALRCRGALATATGADDLAEALRGVETDNGRAPLAVGALPFDRDAPVHLVVPETVQHGPSTAHAAAPVPARRPLPGTWTATPIPAPADHTAAVERAVKLMADGGGAELRKVVLARCLRLTGQREVDVATVLANLAWADPTAFTFAADLPGRDARPRTLVGASPELLVAKRGRSVLSNPLAGSAPRHPDPARDRERAAALLASPKERHEHAVVVEAVVEALRPHCRRLDAPREPRPVTTATMWHLSTRVTGELRDPHTPSHVLARALHPTPAVCGHPTDRAYAVITEIEPFDRGFYTGAVGYTDAAGDGEWAVAIRCADTCGTTIDLFAGGGIMPDSEPEAELAETSAKLRTLLLALGVDQPR

SEQ ID NO: 95023 - protein, 457 aa, unidentified
  source 1..457: note = Thermolongibacillus altinsuensis
  REGION 1..457: note = tr|A0A4R1QDN2|A0A4R1QDN2_9BACI Isochorismate synthase MenF OS=Thermolongibacillus altinsuensis; OX = 575256 GN=menF PE=3 SV=1
MVTLYQNKVIDRLRDALTKKMNIVSVSMKVDEVDPLSFFEAGEKFFLGQRFYWSDCTNEYVFVGLGRTYVIQSDDQSKHRFIEIERKWKKILEGALIEREQDVLGTGPILFGGFAFDPLKRKTEKWINFPSARFILPSILLSKRNNETWLTVNVVDQSLEQLEEIIIHLFNGQKKQNNKDVYCLLKKEIEREKWIQAVKDVTSEIHDGKIQKVVLARELELMFNEQIDSARVLAALREQQPMSYIFAFENGSSCFLGASPEQLVKKEENVCETVCLAGSIKRGKTLKEDEQLGDWLLHDEKNRQEHQLVVDMICNAMNEVCDHVVVPQAPTLLKMRHIQHLYTPVKGYSKENVSILSLVERLHPTPALGGFPQEEAVRKIREIEPLDRGWYAAPIGWMDASGNGEFAVAIRSALIHENEAHLFAGCGIVAHSDAYSEYEETNVKFKPMLFALGGMDE

SEQ ID NO: 95024 - protein, 479 aa, unidentified
  source 1..479: note = Thermomicrobiales bacterium
  REGION 1..479: note = tr|A0A524J1N0|A0A524J1N0_9CHLR Isochorismate synthase OS=Thermomicrobiales bacterium OX=2482790; GN = E4H24_03925 PE=4 SV=1
MTVTDQRSRRVARRQAGPGRLRSTSREVDPIDPIAVFAVASARGLEAALWLQPAADRSIVGVGRAWAVEEGGGDRFEASAHAWRSLLADGLVSSERRGPTEGGPILLGGLGFTGRTPEADDPWAAFGSASLVLPSLTVRRDGPASTLAIATTMGLGSDADPGELEGLWDALAGDADADADRASAPDVTGHPATSTTWPARRSVAVERPDRAEWDRTVGMFAGAVGRGRIDKVVLARRVTYRAPGDLDVIAALRHLAASAPESTTFAFVRDGTTFLGATPERLVQTRGRSFETVAIAGSAPRGSDPAEDARLARLLLASEKEREEHAVVVDTLRAGLSPIVETLQVADSPAILPLRHVQHLVTPITGTLRDEAGLLSLGGRLHPTPAVGGAPRELALELIADQEGFDRGWYAGPIGWLGADGDGELMVALRCGLVTGPEAILFAGCGIVADSDPAREWEESRLKLRTMTTALGGLAVGDR

SEQ ID NO: 95025 - protein, 461 aa, Thermomicrobium roseum
  REGION 1..461: note = tr|B9L398|B9L398_THERP Salicylate biosynthesis isochorismate synthase (Isochorismate mutase); OS = Thermomicrobium roseum (strain ATCC 27502 / DSM 5159 / P-2) OX=309801GN=trd_A0262 PE=4 SV=1
MSCRVLDAPQATLQELWPLAERQARAHDRPVILSCAEHCEPVDPIALFARAASHLPRVLWLVPEREEALVGLAGQRLPLQSVTSPSLPLPARLAAAWRALAQDALAEGPLPPLAVAGLAFDPADERPDPWWQPFGQGQLLLPRLLYRQQGALACRSVQAAVFPGEREPRALLTWPTSSLPTPSAAPRSVVQHELVRPDDWRRMIQHALAAIAAGDLRKVVLARARELVAADPFPLEQALRELAARYPSCTVFAIGIGETVFLGASPERLARVAHGTVATVALAGSRPRASSPEQDHRAAEELRRSDKDRHEHALVVEAIRSALAPLCTSLSIPEEPVVVSMANVHHLATPISGILHDGASVLDVVARLHPTPAVGGTPREAALAFIRQREPVPRGWYAGALGWIEASGDGEIVVGLRSGLVRSQQARLYAGCGIVADSDSVAEWAEAEAKFRPMLEALAGG

SEQ ID NO: 95026 - protein, 457 aa, unidentified
  source 1..457: note = Thermosynechococcus elongatus
  REGION 1..457: note = tr|A0A3B7MA80|A0A3B7MA80_9CYAN Isochorismate synthase OS=Thermosynechococcus elongatus PKUAC-SCTE542; OX = 2016101 GN=D3A95_03465 PE=4 SV=1
MPVSLPLTFDLSSESEFYTQVSTGIQAAQQANCQFLSLGIPLPTVDPLMLLAGLMQVSGESEHFYLEQAGEIVAACGAVATSSVQGSQRFSDLQHFSERILNRVWAIAPAEPRIFCQFSFWDDAANRAFLPRWQVIQRRDQVCLTLSCALETSTPHRLWQDWQLLQRALAHLVADPPPCSPPRAIALPPLTEQYGQFITSVKRALQLLEEGDLEKLVLAAALTLEQPQGFNWLGTLQNLRQQYANCYIFSVGQKRQQVFLGASPERLVKIGDGVLCADALAGSRPRGQTQQEDQRLRNGLYHSPKERYEHQVIVEFLCQTLQQLGMSCEVPTKPRILELSHIQHLQTLIQAPLPQPIHILKVVAALHPTPAVAGYPASRAQDWLRQLELFDRNGYAAPLGWVTPTGEGEFIVGIRSAHLQGTHAHLFAGAGIVKGSQPEREWQEILWKFQTMISALA

SEQ ID NO: 95027 - protein, 458 aa, unidentified
  source 1..458: note = Thermosynechococcus sp.
  REGION 1..458: note = tr|A0A5C2M716|A0A5C2M716_9CYAN Isochorismate synthase OS=Thermosynechococcus sp. CL-1 OX=2583530; GN = FFX45_02225 PE=4 SV=1
MPVSLPLTFDLSSESEFYTQVSAGMQAAQQANCQFLSLGISLPTVDPLILLAGLMQVSGESEHFYLEQAGEIVAACGAVATRSVQGHQRFVELQRFSEQTLSRVWAIAPAEPRLFCQFSFWDHLGSNWGFLPRWQVIQRLDQVWLTLSCALETSTPHRLWQDWQLVQRALTHILADPPPCPPPLAIALPPLTEQYGQFITSVQQALKLLEEGDLEKLVLAAALTLEQPQGFNWLGTLQNLRQQYANCYIFSVGQERQQVFLGASPERLVKIADGVLCADALAGSRPRGQTQQEDQSLRNGLYHSPKERYEHQVIVEFLCQTLQQLGMTCEVPTKPRILELSHIQHLQTLIQAPLPQPIHILQGVAALHPTPAVAGYPASRAQYWLRQLEPFDRSGYAAPLGWVTPTGEGEFIVGIRSAHLQGNSAHLFAGAGIVKGSHPEREWQEILWKFQTMISALA

SEQ ID NO: 95028 - protein, 479 aa, Thioalkalivibrio nitratireducens
  REGION 1..479: note = tr|L0DUQ2|L0DUQ2_THIND Isochorismate synthase MenF; OS = Thioalkalivibrio nitratireducens (strain DSM 14787 / UNIQEM 213 / ALEN2) OX=1255043 GN=menF [H] PE=3 SV=1
MRDPSAHGEGAVTLRAETPDRSGVGTPHPPAQHFEHEMAVARLLRRITHWPFRKGQLLHLSERLPALDLLAWLQANPQNARSFWQNRERTISVAGLGAAVELTAQSEQEVGDLLERSYSILGDRDTVFLGGLSFDGRSGRGEWSAFPGARLVLPAIACCQRNGEYRLSVHLLADSRREFIRRKTQLITALCRLRFRGRARPDAPRPRVSSRIDDVDFAGCRRRIQAVLREIAAGELHKAVLARRVELALTSPVAVFEVLARWREVNPGSFCFAMERGQDLFMGCSPERLYRRHRREFQTESLAGTVRLGRTRDEDVALMARLHRDPKLVQEHDLVTRFVRRQIEPWVTDAQSPEQAGVFKLDRIQHRYLPIRATLKPGVLDHPLLDTLHPTPAVCGFPRGAAQALIEREETAQRGWYSGAVGIVSPQESEFAVAIRSVLVNRERILCYSGVGIVAGSDPEEEWTELEAKIESFLSVLEC

SEQ ID NO: 95029 - protein, 462 aa, Thiocapsa marina
  REGION 1..462: note = tr|F9U6L7|F9U6L7_9GAMM Isochorismate synthase; OS = Thiocapsa marina 5811 OX=768671 GN=ThimaDRAFT_0569 PE=4; SV = 1
MLAPLKTLEQILARLAETIDSLPLTRSEGFVSLVLELPQALTIAPEIPGPQFQFTHNHRGEVRAGYGIAGEWTAQGEARLQTLRTGAKRMSAHWEHLDPDETGFSGFAMLGFASSPVTDAPSEPDTLPNALLWLPELALSSRAGQAAVILSTALPIAREEVFARWKTRLEQVIPRLNQPALDPLTPARLDQGPTEPDPARWQDLVLSALEQIEQAHLEKVVVCRRLRLEGHRRFDLTRLNAALAYLFPSCQVVTIRRHATSFVAATPERLFTQQRDRIEVDAIAGTVCRAASADRDAELTSALRTCHKNLHEHMVVVDAVTDALGHCSRHVEPPDGPRVMQLNNAQHLWSLVRADLDPGMDVFQLAELLHPTPATNGHPCESARAWLRRCEPIRRGWYTGAAGIIEPDLTGELWVLLRCAEIHENTADLYAGAGIVAGSDPDSEWQETEHKLAAMSTALQFA

SEQ ID NO: 95030 - protein, 475 aa, Thiocystis violascens
  REGION 1..475: note = tr|I3YDG5|I3YDG5_THIV6 Isochorismate synthase family protein OS=Thiocystis violascens (strain ATCC 17096 / DSM 198 / 6111) OX=765911 GN=Thivi_3156 PE=4 SV=1
MPRPTTSCLHDPVMLAPLKVLEQLKARLHETIGTLPLGQPGGYASLILELPHGLGIAPDLAGPQFHFAHNHRGDLRAGYGIAGEWRARGPDRLRILRAAAKGVAANWQHMDPDETGFLGFGMLGFAASPNESPNAGLAELPNAIFWLPELALCSHDGQAALILTTALPMGIDSLLTRWQNQLDQIVPLLDLPALDPLTPAHLDRGLSTPDQEDWRELVFAALDEIDQERLRKVVLCRRLRLTGQRRFDLTRLNAALTYLFPSCQVVSIRRHRTSFVAATPERLFTQRRDRIEADAIAGTACRAEDAERDAQITRGLRTCEKNLREHQVVVEAVTEALSQCSRSLEPPDGPRILQLNNVQHLRSIVRGELHPDVDVFRLAELLHPTPATNGQPRQEARDWLDRSEPLERGWYTGAAGIVEPDLTGELWVLLRCARISERIADLYAGAGIVAGSDPMSEWEETEHKLAAMSTALQFA

SEQ ID NO: 95031 - protein, 458 aa, unidentified
  source 1..458: note = Thiolapillus brandeum
  REGION 1..458: note = tr|W0TN43|W0TN43_9GAMM Isochorismate synthase; OS = Thiolapillus brandeum OX=1076588 GN=TBH_C0631 PE=4 SV=1
MARQADKLQPVPVWLGRLRMELRQLAMPVLMSSRRGLLSVSFEVPLTPLDAPPADAQVWQFWQRPESEHCLLGLGLAHRETASGSRRFHHLDAVWQGLRGGWTRISQGHARPRARAFLGFAFDPGFQPDDAWEGFENALIQIPRLLVEWHHGCCVISFNCHLDQAGKPEQLFSRWMDDLDLLLKHTETAEKSVSSCLIREQPSAGSWQRQVADAVNAAERGDLDKVVLSRSLKLRFNRPVEHRRLLSGLARRYPGCNILSVSFGGDVLLAATPERLLHTSAQRVHCDALAGTLPVDARNRDADMEAHEHAPVVSAIRNALDPLCKELSVDECPGRLNLNNLAHLYTAIRGELRPGIRAMQILDRLHPTPAVGGMPRKQALEWMGQDERWQRGWYTGGFGWLGDNNQADLSVLLRCARIHGNRASLYAGAGITRVSDPQRELRETEMKFEPMLRALTEC

SEQ ID NO: 95032 - protein, 474 aa, unidentified
  source 1..474: note = Thiorhodococcus drewsii
  REGION 1..474: note = tr|G2DZU1|G2DZU1_9GAMM Isochorismate synthase; OS = Thiorhodococcus drewsii AZ1 OX=765913; GN = ThidrDRAFT_1554 PE=4 SV=1
MAGPPLSRTHRPLMLQPLKVLEQLKARLREAVALLPLDRNAGYASIILELPHGLTHAPDIAGPRFLFAHSHRGDLRAGYGIAGEWRAEGPKRLDILRAKARAVAADWQHFDPDETGFTGFGMLGLAASPNPSQSKESDLPNAIFWLPELALTSHAGQAALVLTTPLPSTLDALLTRWEPLLDRVVPLLDVPAQDPLTQAHLDPGDSTPDQDDWRELVLTALDEIDQERFEKVVLWRRLRLQGHRRFDLTRLNAALAYLFPSCQVVNIRLHGASFVAATPERLFTQCRDRVEADALAGTACRAEDADLDAEITRDLQHCEKNLREQRVVADAVSEALTHCCSHVEPPDGPRIMQLNNAQHLWSLIRGHLKPGVDVFRLTDLLHPTPATNGQPRQQAHDWLREHEPLERGWYTGTAGIVEPDLTGELWVLLRCARIDDRVADLFAGAGIVAGSDPMAEWQETGHKLAAMSTALQFA

SEQ ID NO: 95033 - protein, 463 aa, Thiorhodospira sibirica
  REGION 1..463: note = tr|G4E2I8|G4E2I8_9GAMM Isochorismate synthase; OS = Thiorhodospira sibirica ATCC 700588 OX=765914; GN = ThisiDRAFT_0517 PE=4 SV=1
MYNPSLPDKHPLMQRLDRNHLADLPTDARLLTLTLSLPSCRIHGLPALDGDWFYWACPQARQYLLGLGQAYMAQVTGCGRLEALSQAFTALQQSWHHRDLDHTGLSPVAFTGFAFDGRDPMAQGWEGLPNAMLVVPELLLHQQGDQTCISLSCALPQAHPEQVLQRWSQRLQTLLTALAMPPRNTLATLAVRVEQHPPLDAWPDLVAKALAAIAAQQLEKVVLARSLRVHTTPQIDPTELMAVLDRLYPDCRHFAIRAADLVFAAATPERLLTRTGERICADALAGSTPVSLDADTDQCLRDELHHSPKNRHEHQLVVRGMQAALAPLCHEVRYAEPPDILRLRHVQHLWTEIHATPKDGVNLFDLAARLHPTAAVSGTPSKTAQNWIETHEGLARGWYTGGGGFIHANGDGEIAVLLRCARLRGQEAALYAGAGIVAGSDTQAECHEIDVKLKAILEALGLV

SEQ ID NO: 95034 - protein, 400 aa, unidentified
  source 1..400: note = Thiotrichales bacterium
  REGION 1..400: note = tr|A0A1H6FC48|A0A1H6FC48_9GAMM Menaquinone-specific isochorismate synthase OS=Thiotrichales bacterium HS_08; OX = 1899563 GN=menF PE=4 SV=1
MKGGGTLSVDWLQALLATSVQQQCTVAVWRLPEQQNISVLVSFSGVQTVVDFQKSATLSGFAVTPFYTSGNEIQLVKPDMLFDSNFGDWRIQPHADRNKVNAFLRLLKKQLSSSTDNMSWFVHTSANQQYQADKTAYTKLVAKALGKIQQKTFDKVVLARQKIMTLSASVHPADLFSACLKLYRAGMVSLISAPNLGTWVGASPERLISRDKQGTIRTTALAATQPVPEHVSTSARQSWDNINWSHKARKEQAFVSRFIRDCYQRIGLKNLVEHGPGTVAAYDMLHLQTDFMIEHETTDYLPFLLLAQLHPTPAVCGMDRTAARQFILAEERFSRQLYSGYLGPVNLGGETHLFVNLRCMQFFKQTAALYAGAGITMDSVPEKEWQETELKMQTLSELLR

SEQ ID NO: 95035 - protein, 439 aa, Tolumonas auensis
  REGION 1..439: note = tr|C4L9G4|C4L9G4_TOLAT Isochorismate synthase MenF; OS = Tolumonas auensis (strain DSM 9187 / TA4) OX=595494; GN = menF PE=3 SV=1
MLAQIRLLEQLNALAKTDQHGFVRLRAPVDVTSLIGWLKAQPLYPRIYWHARERDREFAVLGAIRELTDPAQLAELTGQQRPNAGSYPRYYGGLAFDYQQPVTGEWQDFGQCRFVLPRIELIRQGNQTELVCNLWFEGANAEQEMAAARTALQQLQPEKTLRKYLPTQRERQDTPDKPRWMQWLSQVLQPEALKTIPKVVLSRRSTLTFNEPLEPWSLLASWQCAAPACFHIGFQFSPDSCFIASSPERLYRRQDRQLLSEALAGSTPRTGDPEQDAELATLLLQDGKNRLENRFVHTDILTRLDGLAETAVVSDAHILPLQHIQHIKREIEASLRPDTTDWQLLKSIHPTPAVGGSPRRKALAQIRALEQHQRGWYAGACGFISEDVSEFTVAIRSGLWHDQQLHLYTGAGILTGSDADTEWQELDTKLGSMLGAWHD

SEQ ID NO: 95036 - protein, 364 aa, Tolumonas sp.
  REGION 1..364: note = tr|A0A5C7QZ27|A0A5C7QZ27_9GAMM Isochorismate synthase OS=Tolumonas sp. OX=1978237 GN=E6Q86_03175 PE=4; SV = 1
MSPKEKLYGDIIDSLANRNISFALYRAPEDKNVHFLAQTTGHIRTFYDLKELNGEQGFVIAPFHSGSNKPIVLIQPDCLELEKLAATPCEPLNELDDAFEENNRDALKEEYTRKFHAFVQPLQEKEFDKLVLSRSTTLRREATFSPAAAFFRASKRYTHSYVYLCYTPQTGMWLGSTPEIILSGEQGSWSTTALAGTQSLHQGELPINWDSKNKKEQQLVASYIRRQLQTLHIQPTEKGPYAVRAGELAHLKTDFHFALRETNSLGDMLKLLHPTPAVCGLPKEKAYRFILSQEGYDRSYYSGFIGNLNPSGRTDLYVNLRCMHIGKEQLTLYAGGELLPTSKLADEWNETEKKLQTMLAITNN

SEQ ID NO: 95037 - protein, 434 aa, Tomitella sp.
  REGION 1..434: note = tr|A0A516X8P7|A0A516X8P7_9ACTN Isochorismate synthase OS=Tomitella sp. HY188 OX=2597660 GN=FO059_15110; PE = 4 SV=1
MTSPAATDPDAGSPAGSGSPTGTGAGPLPDPAALLDEYTPGDFYFSTDRYTMLGAGGVHVGAAVPSAASGDAVRAALREAGPTGGRPARVVGAVPFDTSRPARLAIPERLRIIGGGDSGGPAEHGHEGRGQAERSGVGARGELEAFSVTAVPSPEDHIAAVDEALSTMHRSPELHKLVLARTLHLRPGEAVDPLRVLRILARRHPEAYTFAAEIPGGPEGGPRALVGASPELLAARRGDAVRSCPLAGSAARSADPAEDRRRAEALQASAKDQVEHAIVVDAIAESLRPLCRTLEVPRRPELVATPTMWHLATPIAGTVADAAITALDLALALHPTPAICGAPAAAAHAEIGRIEGFDRGFYSGFVGWCDARGDGEWAIAIRCAEVDAAGARLFAGGGIVAGSDPAAELAETSAKFRTMVDAIDEAVRAAPVRG

SEQ ID NO: 95038 - protein, 391 aa, Trabulsiella guamensis
  REGION 1..391: note = tr|A0A085A0T5|A0A085A0T5_9ENTR Isochorismate synthase OS=Trabulsiella guamensis ATCC 49490 OX=1005994; GN = entC PE=4 SV=1
METSMAEDVLDETTTLSSDGFLFMSPYRSFTASGCFRRITTPPEDGGNLNSTFQRSVTTAFSDAKAAGIRKPVMVGAIPFDTTQPSALYIPESWQTFSRTHKQHSARYAAALPEINVTARQDIPAQETFMTMVVHAAERTATPELDKVVLSRLIDISTDTPLNSGALLERLIAQNPASYNFHIPLPDGGVLLGASPELLLRKEGEHYSSLPLAGSARRQPDDMLDREAGNKLLASEKDRHEHDLVTQAMKAVLAPRSKMLAMPDSPQLMTTPTLWHLATPIEGVAREEENALSLACLLHPTPALSGFPHQTAKRLIAELEPFERELFGGIVGWCDDEGNGEWVVTIRCARVRENRVRLFAGAGIVPASSPLSEWRETGVKLTTMLNVFGLH

SEQ ID NO: 95039 - protein, 430 aa, Trabulsiella odontotermitis
  REGION 1..430: note = tr|A0A0L0GUZ9|A0A0L0GUZ9_9ENTR Isochorismate synthase MenF OS=Trabulsiella odontotermitis OX=379893; GN = menF PE=3 SV=1
MHSISAALENLQAALSADFPDSPGVRVVDVAFPLNDAFDPLSWLCSQRCWPQFYWQQRNGDDEIAALGAVKSFLSLADASHFLQTPALPDDLRICGMNAFNPQQGALFLPRLEWRRNAGNAELRLVLWSDRSLREDALQAREFFASLKEGKLLPPLQVTLQAERHHPDHPHWIQLVSEAIATIASGALDKVVLARATDLVFTDALNAGAIMAASRRLNLRCYHFYQAFDAGHAFLGSSPERLWRRRGKLLRTEALAGTVASHPDDAQAQKLADWLMKDDKNQRENMLVVEDICQRLQTAVQTLEVLPPQVVTLRKVQHLRRCIWTELADADDERCLHLLQPTAAVAGLPRTPARAWIEQHEPFTREWYAGSAGYLSRQQSEFCVALRSAKIDGKTLRLYAGAGIVSGSDPEQEWQEIDNKAAGLRTLLFE

SEQ ID NO: 95040 - protein, 471 aa, unidentified
  source 1..471: note = Trichormus variabilis
  REGION 1..471: note = tr|Q3M9U0|Q3M9U0_TRIV2 Isochorismate synthase; OS = Trichormus variabilis (strain ATCC 29413 / PCC 7937); OX = 240292 GN=Ava_2632 PE=4 SV=1
MTVSPCRRSLFVEQKDLYQFLLAVQQNCLKNHCRQIVSVSLEIDWVDPLAVFAKLAQANAINFYFENKVKGEAIAGIDAVTKLQIDGKERFIQSEYFIKSNLENIVNFGNTSQPFAGPHFFCYFSFFAEKNKLDYPFPAATVFLPRWQISVKNQCCTLVMNAVINSSVNIQILLQNLLDKIELINSLEPYSSNLDYFPTNLSKKLVTNGERYKKSVASALEKIQSKELSKVVLADILDVSSNQHFNLLHSLNNLRKTHPNCYIFSTSNGKGQNFIGASPERLITIHNQQLITDALAGSAPRGKTPAEDAANANRLLNSEKERHEHLLVMDFITQRLTQLGLLPQVLPPRLRQLSNIQHLWTPINAIVPANVHPLKIIAQLHPTPAVAGAARDIACEEIRRYETFERGLYAAPLGWIDSQGNCEFIVGIRSALIDGDRARLYAGAGIVAGSDPDREFAEVQLKLQALLKALV

SEQ ID NO: 95041 - protein, 434 aa, Tropheryma whipplei
  REGION 1..434: note = tr|Q83H14|Q83H14_TROWT Isochorismate synthase; OS = Tropheryma whipplei (strain Twist) OX=203267 GN=menF; PE = 4 SV=1
MNRVTTRVTMLPIEVEITRIGNMDRSDFKRQYIRKVLSWDFVYCTHSTMMRTQGRVLKINLDSYSAEARFEAAESLINEIHTKIQYTSENLNPIGLIVLFGFTFSPYSARPSFLAIPEQMFFWSDGVAWKIDATICHNLSEPSRIFKWPKSISFKMGDFRQEDYKHAITNVVNKLLNADISKVVLARDIIAEIHDDFDPEAHAIDLDEAIQRLMNTANGTVFVFDGLFGASPEVLLRTDGNSGFEVSILAGSMSANHPKHVIHNCAASPPYKALDETYLDEKLRLEHSFALNPTLERLSTLMNTAPTVNSYKIRRFTHITHVASFISGTFKPNISPLRALSHIHPTGAIAGEPRERALEIIKEIEPFDRELYGGAIGWIGQDSSCEFTLPIRCAQLNRGHIKAFAGCGIVKSSIPQKELEESTLKFKTIIDAIS

SEQ ID NO: 95042 - protein, 417 aa, Trueperella bernardiae
  REGION 1..417: note = tr|A0A0W1KKU5|A0A0W1KKU5_9ACTO Isochorismate synthase DhbC OS=Trueperella bernardiae OX=59561 GN=dhbC; PE = 4 SV=1
MFTIPHLRAQTTALPTPPVLTELMPASAGALAWLKDGRGFIAAGEAARYDHGRDGAGTRFALASQWWIEVVQAAEIRDTLLRPGTGLVSMGSFAFAADSPVGSALIVPQVVVGFDGEVGWLTFIGPADLDVFDTLTPDALALVDAALRPSSGSYASHGKVRADDVDVAVYRDKVTRIQERIAAGSVRKVVLARELQVEAEREIDERYVVARLAAAYPQCWTFAVDGLVGATPELLAAGTGREVEVKVLAGTLPRGEADVQALLDSAKDACEHRLAVESVVEKLEKLGRVEVAPTEVLTLPNVLHLATQVRAELEIEATSLQVAGALHPTAALGGTPTLRALDTIAEIEGIDRDRYGAPVGWMDTRGGEWCIALRCARIEGRQAIAWAGGGIMADSDPDAEYAETEAKLAPVLGALGG

SEQ ID NO: 95043 - protein, 420 aa, unidentified
  source 1..420: note = Trueperella bialowiezensis
  REGION 1..420: note = tr|A0A3S4UZM3|A0A3S4UZM3_9ACTO Isochorismate synthase dhbC OS=Trueperella bialowiezensis OX=312285; GN = dhbC PE=4 SV=1
MFEIPHLRAQTTPLPDGYEPELAALFLDGEIAWIKDGTGFVAAGEAARYEAPATPSRFALASQWWSRVLADAEIRDELRLPGTGLISVGSFAFNHASPAGSVLIIPQVVVGWDGQTGWLTLIGPTDRDVFDTLSPAARELVDDTLRRRRPPAGEVARVSCAPASTAERADHRSGVVAIQQRIGAGEADKVVLARRLELEASEPIDQRSVVRALAAANPESWTFAVDSLVGATPELLAATKGREVHVRVLAGTAPRERDAKAWLISSTKNTAEHHMSVESVVCALEKLGAVEAGSPFVLELPTVLHLATDIRAHLDLDATSLEVAGALHPTAALGGTPTHAALKIIDEVEGADRGRYGAPVGWMGSHGGEWCVALRCAQIDGTRARAWAGGGILADSDPDTEWAETEAKFAPILDAFNQAE

SEQ ID NO: 95044 - protein, 422 aa, Trueperella pyogenes
  REGION 1..422: note = tr|A0A3Q9GJN2|A0A3Q9GJN2_9ACTO Isochorismate synthase OS=Trueperella pyogenes OX=1661 GN=EBQ10_09645; PE = 4 SV=1
MFTIPHLRAQTTPLPTHPVLSELLRTPVRAMAWMKDGKGFVAAGEAARYDHGPDTANTRFALASQWWTELTTGAEIRDELKRPGTGLVCMGSFSFSPTCPAGSTLIVPQVVVGFDGEAAWLTLIGPVDRDVFDTLTDDARALVDAALRPSPVDYPSHGAVRVDAVDVAAYRDKVALIQERINAGGVRKVVLARELSLQAVSPIDERYVIERLARAYPQCWTFAVDGLVGATPELLAATLEREVAVTVLAGTLPRTADADPQELQASPKDADEHRLAVESVVSELSKIARIEVGPTHVLTLPNVLHLATDIRATLDFMATPLQVAGALHPTAALGGTPRLRALEAIAEVEGIDRDRYGAPVGWMDTRGGEWCIALRCARIDGTHATAWAGGGIMADSLADNEYAETEAKFAPILGALGVADAS

SEQ ID NO: 95045 - protein, 366 aa, Tsukamurella paurometabola
  REGION 1..366: note = tr|A0A3P8MB87|A0A3P8MB87_TSUPA Isochorismate synthase dhbC OS=Tsukamurella paurometabola OX=2061; GN = dhbC PE=4 SV=1
MTASTSGESGHPHFLLTAAGQRLAARGTVATFVDPHAAAAALRAGTAPAVVGALPFDLDDPAALTVPEQFGDAAPGAGRPAGGAPADLPTLTQTAQHPAPAEHVDRVRRAVALIDASELQKVVLARAVDFEADAPLDPLAVAAALEQRDLEGNAFAVDLRAAGGGYRGRWLVGSSPEILVGRMGNTVFCHPFAGTATSPEGLLDSQKDREEHAYVVDEIAAALAPLCAELDVPAAPSVTRAGPVWHLGTKIEGRLADPATSALDLALALHPTPAVCGFPRRTAARAIAEIEGERGFYAGAVGWTTANGDGHWRVSIRCAELDGARLRAYAGGGIVGASDPQAELAETRNKLRTVLGPFRLTETARS

SEQ ID NO: 95046 - protein, 359 aa, Tsukamurella sp.
  REGION 1..359: note = tr|A0A5C5S6W4|A0A5C5S6W4_9ACTN Isochorismate synthase OS=Tsukamurella sp. HKU72 OX=2592068; GN = FK530_01645 PE=4 SV=1
MNQESDHQHFLLTAAGQRLAARGTAATFTDPHAAAAALRAGTAPAVVGALPFDLADPAALTVPEHFGDVADARAAGTDAELPTLTQTAQHPAPAEHVDRVRRAIALIDDSELLKVVLARAVDFEADAPLDPIAVAAALEQRDLEGNAFAVDLGAAGEDYRGRWLVGSSPEILVGRMGGTVFCHPFAGTATSPDGLLDSPKDREEHAYVVDEIASALAPLCAELDVPAAPSVTRAGPVWHLGTKIEGRLADPSTTALDLALALHPTPAVCGFPRRTAAGAIADIEGERGFYAGAVGWTTANGDGNWRVSIRCAELDGARLRAYAGGGIVGASDPQAELAETRNKLRTVLGPFRLTETARS

SEQ ID NO: 95047 - protein, 402 aa, unidentified
  source 1..402: note = Tumebacillus algifaecis
  REGION 1..402: note = tr|A0A223D397|A0A223D397_9BACL Isochorismate synthase OS=Tumebacillus algifaecis OX=1214604; GN = CIG75_13315 PE=4 SV=1
MTTFTVSTAEKATQLLEDYQAGSSFFFSSPLRTLLARGTLLSLPKGESGKLAEHVDELLKHAKQSEEDVSIIVGAVPFDHRRPAQLVVPTSVQIAGPLHFDANAAENPPASTTYEIEPVPTPEQFMRGVESGLARLESGELCKIVLSRTLQMTSTTPVDIHQLLKNLARKNKHGYTFAVDLPGDEESDSRYSKRTLIGASPELLVSRTGMTVTANPLAGSTPRSKDPIEDQKRAQALLASAKDLHEHAVVIDAVAAALRPFCRTLEVPESPSLVHTETMWHLSTTITGELSDPSTSSLEVALAMHPTPAVCGTPTDLARTAIGEIEPFDREFYTGMIGWCNSQGDGDWVVTIRCAEVEDRSMRLYAGAGVVLGSSPEAELAETSAKFRTMLHAMGLNNETTS

SEQ ID NO: 95048 - protein, 466 aa, unidentified
  source 1..466: note = Unknown
  REGION 1..466: note = tr|V4XMY7|V4XMY7_9ARCH Isochorismate synthase; OS = uncultured archaeon A07HR67 OX=1412871 GN=A07HR67_01780; PE = 4 SV=1
MEPARSRSSPTLVSRTTAVESPAFAAAFEALPTPRTTWTAPDDALVLGGGAAATLTADGADRFAAIRAATDELFASGDVHAGTEAARPRVFGGFAFHEGACAGEPWESFPEARFVLPRIQVTFADNGTWLTVTDAGPDASATAVETRLDREVERLAGRQAAESRPPRPGIRDQRRTTSRDAWRASVTAALGRIGDGEIRKVVLAQALEAALDDKFPRAATLERLAAKYPDCHRYCFEPDDGSSVFFGATPERLVSLRGRTVETDALAGTTGRGETPAEDEWLAEELLADDKNVHEHELVAETVRDQLEPFAASVSAGDRRVRRLATVQHLHTPITAELSADRHVLELVEALHPTPAVGGLPPGRALETIHETEPFDRGWYAAPVGWIDAAGNGAFAVAIRSAVATRRLATLFAGVGVVADSDPDREWDEIQLKYRPILDELETGSDPDAARLDDPLWTDADRPADD

SEQ ID NO: 95049 - protein, 424 aa, unidentified
  source 1..424: note = Unknown
  REGION 1..424: note = tr|A0A486XD59|A0A486XD59_9PAST Isochorismate synthase MenF OS=uncultured Avibacterium sp. OX=1936169; GN = menF PE=3 SV=1
MDNLQSIKQQLIERISPTLPTQQGIACVQAEIETALNLLSWLKGQKTYPQFYLNLRDSTQVVAAIGQVRGFSQLNQAQAFMLQSGYPLVGGVQFYGESQFFLPRLYLQQQENKLNIQLFIDQTKNIEQERQACLNALKTFEKSTALCPIQQSIHFGKKRAEQREWCEWVEKGLQHIKQGVLNKIVLANETLFQSEGKLNAYDFLGESERYNFGCYHFLFAETEKCIFIGSSPERLYQRQGSQLRTEALAGTALVGENAQETEQQAQWLLQDEKNIYENQLVVDDIKQHLAPYSQHITVSPLGLKTLRQVQHLRRQISAQISPEYGDDIFLNAIHPTAAVAGLGRNEALAFLRQTETFDRRWYAGTLGVMQKEWAEFCVAIRSAFIEQEQIRVFAGAGIVEGSIPLLEWQEIERKALGLISLLQE

SEQ ID NO: 95050 - protein, 143 aa, unidentified
  source 1..143: note = Unknown
  REGION 1..143: note = tr|A0A2I6QKA7|A0A2I6QKA7_9BACT Isochorismate synthase OS=uncultured bacterium OX=77133 PE=4 SV=1
MKEVLRERSSELHVPSSPQLITTPTLWHLATPFEGKANSQENALTLACLLHPTPALSGFPHQAATQVIAELEPFDRELFGGIVGWCDSEGNGEWVVTIRCAKLRENQVRLFAGAGIVPASSPLGEWRETGVKLSTMLNVFGLH

SEQ ID NO: 95051 - protein, 371 aa, unidentified
  source 1..371: note = Unknown
  REGION 1..371: note = tr|A0A1C5QBL6|A0A1C5QBL6_9BACE Isochorismate synthase entC OS=uncultured Bacteroides sp. OX=162156; GN = entC PE=4 SV=1
MNKPDSQIHKLIDRMTCSDKSFAIYRLPWTDTPILVMQDGVENHVFANLKELNGEKGFVISPFRFTEDHPGVIIRPDVTASGWDEITEKISNVVIEERPSDHTTSSEISQTEPDLKKTYIETFSRFIGPLKNKTFSKLVLSRNAGYTLSDNFSPLEAFITACNSYPRMMISLSHTPVSGTWIGSTPEIILSGEGNTWNTVALAGTMPMQGEVMPTEWHKKEQDEQAFVSEYINKVIKKFSSKIAIKGPYTTRAGQLVHLRTDFQFGLKKTSELGNLLDALHPTPAVCGLPKDKAYDFIIENEGYDRKYYSGIIGWLDPNGHTTLYVNLRCLNVSGNYATLYAGGGILPSSDSNSEWEETQHKMKTIKLVIS

SEQ ID NO: 95052 - protein, 432 aa, unidentified
  source 1..432: note = Unknown
  REGION 1..432: note = tr|A0A212IEA3|A0A212IEA3_9ENTR Isochorismate synthase MenF OS=uncultured Citrobacter sp. OX=200446; GN = menF PE=3 SV=1
MHSITTALESLMRHLSQEIPAAPGIRIYDIPFPLNDAFDALGWLASQPVWPQFYWQQRNGDEEAAVLGAVAAFSSLESAQQFLRQHDNHPDLRIWGLNAFEPQRGNLLLPRLEWRRCAGVASLRLHLYSDVSLREDAAHAIAFISSLAPVKPLPALRLNLTGEQNWPDKAGWTNLIKLATQTINREELDKVVLARATDLQFSQSVNAAAVMASSRRLNLNCYHFFMAFSADSAFLGSSPERLYRRRDTALRTEALAGTVANHPEDHRAWQLGEWLMKDDKNQRENMLVVEDICQRLQGCTQTLDVLPPQVLRLRKVQHLRRCIWTELNQADDTLCLMQLQPTAAVAGIPRELAREFIQQNEPFEREWYAGSAGYLSRHQSEFCVSLRSAKISANVVRLYAGAGIVRGSDPEQEWQEIDNKAAGLRTLLQMEA

SEQ ID NO: 95053 - protein, 364 aa, unidentified
  source 1..364: note = Unknown
  REGION 1..364: note = tr|A0A1Y5PKI5|A0A1Y5PKI5_9MYCO Putative isochorismate synthase OS=uncultured Mycobacterium sp.; OX = 171292 GN=menF PE=4 SV=1
MAQPSFVLSGPAGTVVAEGIQTGYDDAAAAAAALAAGSADVVVGALPFDIRGKAALLSPTSVTFTDALPVWTTAALPAVRIAATLPSPDEHRARIRTALDCLTKPESALQKVVLARALSLVADGPLDERAILRRLVADDAEATAYLADLSPAGGGYTGTALVGASPELLVARSGELVTCQPFAGSAPRSADPATDAANGAALAESGKNRHEHQLVVDTMRAALEPLCADLDVAGQPQLSHTAALWHLSTPIRGRLRDTSITAIDLALALHPTPAVGGVPTQDAVDLIAQLEGDRGFYAGAVGWCDARGDGRWVVAIRGAQLSDDRRRALAQAGGGIVAESDPDDEVAETTTKFRTILSALGVQQ

SEQ ID NO: 95054 - protein, 457 aa, Ureibacillus terrenus
  REGION 1..457: note = tr|A0A540V064|A0A540V064_9BACL Isochorismate synthase OS=Ureibacillus terrenus OX=118246 GN=FKZ59_10905; PE = 4 SV=1
MQQKWLKTTEVEVASNKLSFYIETIEVNQLSPLAFFAAGERKYKGKRFFWQNREKTLAIVGLGQAIILENRRIDRFDDIEFKWKELTKNIVMEEQEPQPILFGGFTFDPENVEPGEWDGFPSSYFTVATFQLTKQHEKTYVSIHLITDRQDSSALFDQLREERDQLIHAAQVKELKTYEKPEIRTIDERNKDNYFQAVQSVTNLIRNHKADKVVIARSLELEFKGQPSSPQVIYQILNEQPESYLFALERDNLLFFGATPERLVKVENQYAYSACVAGSIKRGKTAEEDKKLGEQLLNDSKNLKEHQYVVDMIASTFKKHCEHYKVPKRPKLLKIRDIQHLYTPVEGKLFDHATILQLVKHLHPTPALGGVPRNKALEMIREFEKMNRGLYAGPVGWMDADGNGEFVVAIRSAALIDDKAYLYAGGGIVADSNPMTEYDETLVKFRPMLRALGGQIQ

SEQ ID NO: 95055 - protein, 459 aa, Ureibacillus thermophilus
  REGION 1..459: note = tr|A0A4P6UUU7|A0A4P6UUU7_9BACL Isochorismate synthase OS=Ureibacillus thermophilus OX=367743; GN = DKZ56_12400 PE=4 SV=1
MQQKWLKTTEVEVASNKLSFYIETIEVNQLSPLAFFAAGEKDYKGKRFFWQNREKTLTIVGLGQAIVFENRGNHQRFDEIEQKWKELTRNIVMEEQESQPILFGGFTFDPDNRELGEWDEFPQSYFTVATFQLIKKHEKTYVSIHLITEQQNSAALFDELRDERDRLIHAAQVKELKTYEKPEICSIHERNKDNYFQAVEKVTNLIRQKEADKVVIARSLELAFKNQPSSPQVIYQIMNEQPESFLFGLERDHLLFFGATPERLVKVKKQYAYSACVAGSIKRGKTAEEDKRLGEQLLNDSKNLKEHQYVVEMIEKTFKKLCEEYRVPKRPKLLKIRDIQHLYTPVEGKLYNDATILQLVKYLHPTPALGGVPRNKALEMIRKYEKMNRGLYAGPIGWMDADGNGEFVVAIRSAALIDDKAYLYAGGGIVADSNPMTEYEETLVKFRPMLRALGGQFNE

SEQ ID NO: 95056 - protein, 445 aa, Vagococcus fluvialis
  REGION 1..445: note = tr|A0A1X6WNA8|A0A1X6WNA8_9ENTE Menaquinone-specific isochorismate synthase OS=Vagococcus fluvialis bH819; OX = 1255619 GN=FM121_06620 PE=4 SV=1
MKKELINFELPEKLKNEIITEPTLISWVFNINADPLISDYERTSTHYAEHFYFENATDNSGIYGVGSLPAVFTRIITNASVEMTGPIEMISGLFDETTDSSEIWGELSQTVTYLPKIIRTEKQNQQWVTINMLVNSTEDLFVQWQEEIKNLYLFRQLERPSTKKINKILIKEELKIEDWLQEVELSVAHLKSSETLNKIVLARQLKIMTEKSINPVDVLKRLRAEQPDTYRFVVAKNQSYFIGATPERLLQATTTDYSTVCVAGSIKRGKTLKEDQQLGDGLLSDQKNVIEHHYVVRWLQEEMTKLTTSLDKKIPVSLLKNRDIQHLFLPIKGERKKEVTFSEGIAALHPSPALGGLPKKEAINWIKNHEYYPRGLYGGPLGWRNILEDTGEVVVGIRSAYICDNQAILYAGCGIVEDSIATLEREETKVKFQPMLRALGGQINE

SEQ ID NO: 95057 - protein, 460 aa, Vagococcus sp.
  REGION 1..460: note = tr|A0A4D7CUQ5|A0A4D7CUQ5_9ENTE Isochorismate synthase OS=Vagococcus sp. MN-17 OX=2571750 GN=FA707_02455; PE = 4 SV=1
MMIPSQLLTTPKHDYYSWVMPLDCTDSPLTFYKKITNDQLKPNMYWETPDQTTQFCAWGAEMLLSEAQASLTKIKQLPTNSSIFEGSDLDQKIEATGCLLVGGFSFDQADCQPADTWGELAQGYFFIPTFIITNHEEQTYLTINIKHDDHTSLADAWQQRIASFEHLVAQVLTDSPVVTQVETEEVATQAWVSLVEETVNEIKTQPALTKVVLARETAVEQDQVFEPAQIVARLKQQQAATYFFSLSSGEHTFIGATPERLLKATAKQLVTASIAGSTPRGTTELEDQQLGEALLNDQKNRKEHLIVVQRIIKDLENITQTEIHAHEPVLLKNRDIQHLHLPIIAQRSEATRFLDVVEQLHPTPALGGEPKALALEWLRKNEPLNRGLYGAPIGWYQPTTDQGEFAVGIRSGVFHGETGRLFAGCGIVADSQAELERIETKVKFRPMLRGIGGQLDDTSK

SEQ ID NO: 95058 - protein, 438 aa, Variovorax sp.
  REGION 1..438: note = tr|A0A520E7W1|A0A520E7W1_9BURK Isochorismate synthase OS=Variovorax sp. OX=1871043 GN=EOP81_03100 PE=4; SV = 1
MSFELNTRHSGDDRATGPDGDFSTDHADTLDALLAAYQPGDSLFASPSGAWLGQGVACTLRAGDGTAWPASVEGRAQAAADVGRRARALLAQAEQTPGLHDPIVMGVVPFDVRQPARLVVPRQVRRAVGGQRIEATAPGSAWAPVVLARPAQPAPEPAAYEAAVTNALARFARGDLDKVVLARTLRLTLQAAPDRAALLRRLVAGNTHGYTYAIALTDAAGAAAEGLAEPAAFVGATPELLVRRTGRQVVVNPLAGSAARSADPVRDPQIGQALMQSPKDRHEHAVVIDSVARALRPLCRTLTVPEAPSLVATDALWHLSTTLTGELADPATSSLDLALALHPTPAVCGHPSAPAFDAIAALEPFERGFFAGFVGWCDARGDGEWAVALRCAELRDRELRLYAGAGIVAGSVPASESLETGTKFRTMLSALGLGSALD

SEQ ID NO: 95059 - protein, 352 aa, Veillonella atypica
  REGION 1..352: note = tr|E1LBF2|E1LBF2_9FIRM Isochorismate synthase; OS = Veillonella atypica ACS-134-V-Col7a OX=866778; GN = HMPREF9684_1424 PE=4 SV=1
MDRQSNRIVVGAKRLATVKDDEDRHNYAYVFYGDTFFDTSKDPKWSGMGHEMIAFTHYYIVENGEAFYLHAGESVSTEDIEVPHIRHDFRETSDDKGDWDRLMNAISDGIGRGEMTKVVASREVQFTSDTPFNVASILTNLVENNPNCFIFGYEKDGRTFVGASPEILVRHRGSEILSYALAGTAPKDGPNAWTKEQLLSDKKNLFEHNIVRDRIVNTMKQITPDVTVGETGIMELAHLYHLRTIITAKDSTKSLVEWAKLLHPTPALGGEPREKAMALLETYEAHERGMYAAPFGFMKDMGDGIVVVAIRSALIMDNILYAYAGCGVVADSDADEEYIETNNKMRTILDAL

SEQ ID NO: 95060 - protein, 387 aa, Veillonella criceti
  REGION 1..387: note = tr|A0A380NKQ5|A0A380NKQ5_9FIRM Isochorismate synthase dhbC OS=Veillonella criceti OX=103891 GN=dhbC; PE = 4 SV=1
MKYTIFPTEVTNPLAVWQQFEGSERVYWHDTQVNRVIVAAGRVKRITEAELPEYPWAWYSQSFFDTMNDSTWQDMGNELVVFTYYYVKEEGKAYWVTADSIAPVITETVVPHIKHTYEMVTTGDYPAWERLFEGIQKSIQSGEVKKVVASRKVAFHSDRPFQVTSIIHNLVEQNQGAFIFAYAKGEAVFLGASPEVLVRKRGQDFMSYALAGTLKKDDIQDGGERLLTDAKNLREHQIVIDRIRQTMLTLCDKVDVQDTHIMELPNLYHLRTLLYGHDTNDSILTMAKALHPTPAMGGEPREKALQVLKTYEPYERGLYASPVGWVCGNTPLFREAGDGLLIVGIRSALIHGQDLYAYAGCGVVAESDCEAEYTETATKLQTILKAL

SEQ ID NO: 95061 - protein, 380 aa, Veillonella dispar
  REGION 1..380: note = tr|A0A4Q5BK03|A0A4Q5BK03_9FIRM Isochorismate synthase OS=Veillonella dispar OX=39778 GN=EAI97_08195; PE = 4 SV=1
MKYNKEPLKLNSPVSFWMNFPNEERVFWVDRQSDRIVVGAKRLATVKDDDDRHNYAYVFYGDTFFDTVKDPKWSNMGHEMIAFTHYYIVENGESFYLHAGESVPIENYEVPRVHHNYKETSDDKADWNRLMNAIANGINGGEMTKVVSSRKVEFTSETPYNVSSILANLVDNNPNCFIFGYEKDGRTFVGASPEILVRHRGSEILSYALAGTAPKDGPNAWTKEQLLTNKKNLVEHNIVRDCIVNTMRQITPHVTVGETGIMELSHLYHLRTIITAKDSTKSLVEWAKLLHPTPALGGEPREKALALLQEYESHERGMYAAPFGFMKDMGDGIVVVAIRSALIMDNVLYAYAGCGVVADSDADEEYAETNNKMRTILDAL

SEQ ID NO: 95062 - protein, 380 aa, Veillonella parvula
  REGION 1..380: note = tr|A0A418PK21|A0A418PK21_9FIRM Isochorismate synthase OS=Veillonella parvula OX=29466 GN=D3219_00910; PE = 4 SV=1
MIYNKEPLELNSPVAFWLNFPNEERVFWVDRQSDRIVVGAKRLATVKDDEDRHNYAYVFYGDTFFENSKDPKWAGMGHEMIAFTHYYIVENGESFYLHAGESVPITDFEVPRVRHNYKETSDDKAAWDSLMNAIADGISSGEMTKVVSSREVQFTSETPYNAASILANLVDNNPNCFIFGYEKDGRTFVGASPEILVRHRGSEILSYALAGTAPKHGPNAWTKEQLLTDKKNLFEHNIVRDRIVKTMESITPDVTIGETGIMELAHLYHLRTIITAKDSTKSLVEWAKLLHPTPALGGEPREKALALLQKYEAHERGMYAAPFGFMKDMGDGIVIVAIRSALIMDNVLYAYAGCGVVADSDADEEYAETNNKMRTILDAL

SEQ ID NO: 95063 - protein, 380 aa, Veillonella rodentium
  REGION 1..380: note = tr|A0A239YHT2|A0A239YHT2_9FIRM Isochorismate synthase dhbC OS=Veillonella rodentium OX=248315 GN=dhbC; PE = 4 SV=1
MIYNKEPLELNSPVAFWLNFPNEERVFWVDRQSDRIVVGAKRLATVLDDEDRKWYAYVFYGDTFFDASNDPKWEGMGHEMIAFTHYYIVENGESFYLYAGEPAVIEDVPVPRVRHEYAETSDDRADWDRLMNAIGESIAHGKTTKVVASREVQFTSPEPFNVASILANLADNNPNCFIFGYEKDGRTFLGASPEILVRHRGSEILSYALAGTAPKDGPNAWTKEQLLTDSKNLLEHNIVRDRILNTMKDITPHVSVGETGIMELAHLYHLRTIITATDSTKPLVEWAKLLHPTPALGGEPREQALALLQKYETHERGMYAAPFGFMKDMGDGIVVVAIRSALVIGNTLYAYAGCGVVGDSDADAEYEETNNKMRTILDAL

SEQ ID NO: 95064 - protein, 380 aa, Veillonella sp.
  REGION 1..380: note = tr|F9N6H2|F9N6H2_9FIRM Isochorismate synthase; OS = Veillonella sp. oral taxon 780 str. F0422 OX=944564; GN = HMPREF9200_1325 PE=4 SV=1
MKYIKEPLQLDNPLEFWLNFEGEERVFWVDRQSDRVVVGAKRLAVVQDDIDREQYAYVFYGGTFFPTVKDKKWSNMGYEMVAFTHYYIVENGESFYLHAGEGVDIQRHKIERVDHAFTETSDDKQDWDTLMDAILTNIHEGRMTKVVSSREVEFTSPTRFDVVSILDRLVENNPNCFIFGYEKEGRTFVGASPEILVRHRGDEILSYALAGTAPKFGPKAWTKERFLNDHKNRVEHNIVRDRIVHTMRQVTEDVAVGETGIMELSRLYHLRTIITAKDSTKSLIEWGQLLHPTPALGGEPRELAMDLLAKYEAHERGMYAAPFGFMKDMGDGILVVAIRSALIMGNRLYAYAGCGIVSESNSDEEYEETINKMGTILDAL

SEQ ID NO: 95065 - protein, 535 aa, unidentified
  source 1..535: note = Verrucomicrobia bacterium
  REGION 1..535: note = tr|A0A3M1GWM7|A0A3M1GWM7_9BACT Isochorismate synthase OS=Verrucomicrobia bacterium OX=2026799; GN = D6781_01655 PE=4 SV=1
MAPGGSGWPGGTPSPARKSGKPRSSFRGPTSPEPRQRPRSPHPKSRSPRLMKLLPLAPEDAGSREAFGRFLAACREQARARGRPQLASITLEASHLDPLAVLESIYEPGELHFYCEQRSSDFAVAGAEAVVRFDPEGESRFAHARAFIEETLENTIAIGDLSLPFGGPHFFATFGFFGSPKRRSAFPSATVFVPRWQVAGREGRFSAVANLLVEPDADLEAIAAKVWRAREKFSAFDYSRAQSEPVRGAAAFAVTEVGDGPDFRRRVEAALGLIEAGAFEKIVLARAVDAVAPSALHPLGVLNALRQRFPECYAFSAGNGHGQSFIGATPERLVRVIDGTLATEALAGSAPRGRTAAEDARFASELLRSEKDRREQRLVLDSVLRRLRALGIEAAAEGPARIKRMQNVQHIHTPVRGAMPDGMHILDAVSALHPTPAVGGTPREAACAHIPTLEPFERGLYAGPLGWVDPQGGGEFVVGIRSALVDGDRARLYAGAGIVAGSEPEREFRETELKFRAVLDALREVEAGDSAGGER

SEQ ID NO: 95066 - protein, 474 aa, unidentified
  source 1..474: note = Verrucomicrobiae bacterium
  REGION 1..474: note = tr|B5JNX2|B5JNX2_9BACT Isochorismate synthases subfamily OS=Verrucomicrobiae bacterium DG1235 OX=382464; GN = VDG1235_3063 PE=4 SV=1
MDTIQLDPTQAKSYEALYAFLQGCQFKAVEKGRAQLVSIAAASSALDPLAVLESIYEDRQQHFYVERKRDDVAIAGAENAISYSPESCTRFKSVRDWIEDTLDNTIAVGDPNLPFFGPTFFCGFSFFEKVDEDASFPASTVFVPRWQVAVTGGRCVAIANATIADGDDVEAVAKRIWNANTKFRTFDYSDEEERSKRERLKVLETTECGGDSVFKESVAAALERISAGEFEKIVLARALDLRADQSFHPLEILNTLRERYEDCYAFSIANGKGQSFIGASPERLVSVSKGRVNVDVLAGTASRGKTASEDARLGAGLLESEKDRREHQIVYESVCRRLSDLGLIVKGECLPSLKKLQNVQHLFVDVEAELVNGIHLLDMVTALHPTPAVGGTPREAAVPRIRELERFDRGLYAGPIGWINAKGEGEFLVGIRSALVDGEKARLYAGVGIVEGSVPEREYVETNLKFQALKENLL

SEQ ID NO: 95067 - protein, 396 aa, Verrucosispora sp.
  REGION 1..396: note = tr|A0A372G658|A0A372G658_9ACTN Isochorismate synthase OS=Verrucosispora sp. LHW63014 OX=2294034; GN = D0Q02_03075 PE=4 SV=1
MTITHPNVTVGRALDLLAKYDATAPFFFASPRGTLLAEGRSHPVPATADLSTAVRDVLDLATADGDDDPLVVGAVPFDPSATPRLCVPRRIRRSGPLPSRFALPSRFALPSRFALPMEADRVDARRVEVPGRATYADGVRRAVTRLRAGELDKVVLARALDIVTTEPIDIGTLLRRLAARDPAGYTFAVDLGAGTLIGNSPELLVSRQGDLVTANPLAGSLPRSDDPFEDFGQAQALLASRKDRREHALVVEAVADGLRPLCTDLEVPAEPSLIRTAAMWHLSTVVTGRVLDPAVRSMTLAAALHPTPAVCGTPARAARAAIAEYEAFDRGFYTGLVGWENNSGDGEWVVALRCAVAHGSSARLYAGAGIVADSDPAAELAETTAKFRTMLTGLEL

SEQ ID NO: 95068 - protein, 386 aa, unidentified
  source 1..386: note = Verticiella sediminum
  REGION 1..386: note = tr|A0A556AZG7|A0A556AZG7_9BURK Isochorismate synthase OS=Verticiella sediminum OX=1247510; GN = FOZ76_02995 PE=4 SV=1
MTPLSDDAPRPPVPDFLLDGPRHSLTVAGRKRDLPSGALPTLAERAASFFDSHPDGPRLLVGAIPYDRRADDALFQPDALVARRWTAPAASGGGTRAVRVVAEPSGAGYRAAVAEAVRRIQRGEFDKIVLSRSLRLLGEQPHAEAELLARLQRDPEATVFRVPLPARRAGERRRLLGATPELLLQRQGRQVVSHPLAGSARRHADTARDRAAGAALLASDKDRREHAMAAEMVLDALAPYCDRLSAPQGMALVSTAQMWHLGTRIEGRLRDPESSCAELLAVLHPTPAVGGMPRAAAEAALPALEGYDRGFYAGAVGWIDGAGDGCWYLALRCAELLDTEARLYAGAGIVAGSDPALEEAETSAKFLAMLATFGIDESGRSLDNAA

SEQ ID NO: 95069 - protein, 424 aa, unidentified
  source 1..424: note = Vespertiliibacter pulmonis
  REGION 1..424: note = tr|A0A3N4VL40|A0A3N4VL40_9PAST Isochorismate synthase MenF OS=Vespertiliibacter pulmonis OX=1443036; GN = menF PE=3 SV=1
MSLFTELKQKLSQQLDRLPNEQAGLIELKAKVTLENRNLEINLLSWLKGQSTFPQYFWQSRDQQLTFATIGTVIQFDEISHAQHFSQQTGFRLFGGIKFEGQCHFILPRLVLTKKSDQLTACLYVNPQEKSKYIELIDQLEYCSNVHSIFPTHILSSNKVSDFPRWEDLLQNAIQAIKQQQFCKVVLANATTLTVEEPISAYDLLTASQQKNTGCYHFLWAENANSTFIGSSPECLYQRNGRQLQTEALAGTVAVTQDLNQTEHNRLWLLNDKKNIHENQLVVDDIQQHLQDCCDDISINEIEIKKLHNVQHLRRKIQATLHPTINDADCLTRIHPTAAVAGLPRSKALAFISYNEGFTRGWYAAAFGSFSQHSSEFCVALRSGLVSNNQITFYAGAGIVEDSQAQSEWQEIERKALALASLLQ

SEQ ID NO: 95070 - protein, 485 aa, Vibrio aerogenes
  REGION 1..485: note = tr|A0A1M5XZE8|A0A1M5XZE8_9VIBR Isochorismate synthase MenF OS=Vibrio aerogenes CECT 7868 OX=1216006; GN = menF PE=3 SV=1
MVHFHQAVRQLINQVQHSSDKTLRCTLTLSAPPSFGLPDWLECQTLFPKFYWQDREGQEEVVALGQCYRFDDPAPAYSVISAGQRIWGGRSFDGGTDKSPGCPESFFFMPLVELIRDGDVWILAVNLSGNPLSSDQFSDNQFPGNQCSGNQSPGEQCSENQFCENQVPENQCCKNNSAESQFALNQSRAIDALEQLVMNVPELKPVKTGIQSVVHQPDEQQWCDLMDKALSKIQQGAFDKVVLARQSSYGLKTPVRAAQLLKASCRQNHHSFHFLLAVDGQRSFTGSTPERLYLRVGQSLETEALAGTTGRGQTPVQDQELADWLIHDDKNIQENQYVVDDIVDHLTPLSLEIDTVEQPRLIKLSRVQHLKRRIHARLKAGVNGVHLLSSLQPTAAVAGYPRPAAQAFIAQEEPFSRGWYAGAIGYISHEKAEFCVAIRSALIVGEQIRLYAGAGIVPGSVAKEEWQELNRKMSTLLSLMADDEQ

SEQ ID NO: 95071 - protein, 437 aa, Vibrio agarivorans
  REGION 1..437: note = tr|A0A2K1DUV3|A0A2K1DUV3_9VIBR Isochorismate synthase MenF OS=Vibrio agarivorans OX=153622 GN=menF PE=3; SV = 1
MSSFHQIVNTLIQRIEIAGSDISRIVESMDEHPCFEPLDWLEAQTLFPKFYWQSRNAYEEVVALGQHHIFDAPGPAYDLLSSGQRVWGGCGFDRLKIQANFNQSSWFFLPKIELIRHHRRWSLAVNLSGDNTSTIEDLRQLIAEVPKLTAVNTSICSIKHSPNRFEWQRLVEQALAEIGQHKFKKVVLARQSTLKLDSSLSAAQLLKSSTIHNHDSFHFLLSLNRQQSFIGSTPERLYSRVGRTLKTEALAGTVGRGDNAAQDSAFANWLTQDVKNLKENQYVVDDIVESLSPYIETIDVESNPSLVRLKQVQHLRRRIEVTLKPEINGVQLLAALQPTAAVAGLPRQSSMQFILNNEPFSRGWYAGSIGYLSHESAQFCVAIRSALVMEGNVQLFAGAGIVPGSIAEQEWAELEKKTSTLLTLISESTSAREYHES

SEQ ID NO: 95072 - protein, 435 aa, unidentified
  source 1..435: note = Vibrio alfacsensis
  REGION 1..435: note = tr|A0A347URR3|A0A347URR3_9VIBR Isochorismate synthase MenF OS=Vibrio alfacsensis OX=1074311 GN=menF; PE = 3 SV=1
MSQFHQAVKRIIERVQQAEGNQTRLVEPLGVKPNFAFIDWLEAQPLFPKFYWQSRDTREEVVALGQLHTFVEPGPAYTILGEGQRVWGGRSFDGQHEKNRRCMPSFFFLPQIELIRFDQQWSLAVNISDDKTRTLAGLQKLVCDVPSLAPVSSHILSIEHSPSESQWHDLVDKVLTGIKNDDFKKVVLARKSSVHLDTELSAAQLLKASYLNNHHSFHFLFSLDSKHSFMGSTPERLYSRVGHELHTEALAGTIGRGSNAAEDMELANWLSNDSKNLNENQYVVDDIIERLQPHSEAVEVDKEASLVRLRKVQHLKRHIHAQLHSGINGVQLLSALQPTAAVAGLPRKESMQFILDNEPFARGWYAGSMGYISHERAEFCVAIRSALILGDQVQLFAGAGIVPGSIAEHEWSELDKKMSTLLSLISEHPPLGVAS

SEQ ID NO: 95073 - protein, 435 aa, Vibrio alginolyticus
  REGION 1..435: note = tr|D0WVB3|D0WVB3_VIBAL Isochorismate synthase MenF; OS = Vibrio alginolyticus 40B OX=674977 GN=menF PE=3 SV=1
MSQFHQAVKRIIERVQQSEGNQTRLVEPLSEKPNFSFIDWLDAQPLFPKFYWQSRDTREEVVALGQLHAFVEPGPAYTILGEGQRVWGGRSFDGQHEKNRRCMPSFFFLPQIELIRFDQQWSLAVNISEDKARTLAGLNKLVCEVAALAPISSHIRSIVHTPSQPQWNELVHKVLTGIENDDFKKVVLARRSTVQLDNTLSAAQLLKASYLSNHHSFHFMLSLDSKHSFMGSTPERLYSRVGHELHTEALAGTIGRGDNATQDMELANWLSQDQKNLNENQYVVDDIIDRLSPHSEVVEVEAEPSLVRLRKVQHLKRNIHASLRAGINGVQLLSALQPTAAVAGLPRQESMQFILDNEPFARGWYAGSMGYISHERAEFCVAIRSALVLGDQVQLFAGAGIVPGSVAEHEWAELDKKMSTLLTLISDHPPLGVAS

SEQ ID NO: 95074 - protein, 438 aa, unidentified
  source 1..438: note = Vibrio algivorus
  REGION 1..438: note = tr|A0A557P5V7|A0A557P5V7_9VIBR Isochorismate synthase MenF OS=Vibrio algivorus OX=1667024 GN=menF PE=3; SV = 1
MSELPQVIELIIERIRRGQVSSENRISEVVNLPEDFSAIDWLEGQSLYPRFYWQSRDEREEVIALEQVNSFTNPLDAYSILAEQQRVWGGKAFDSEHSNTPELTSYFFLPKIEFIRQDNQWTVNANIDPDVELTIDALLQLKADYQPIETLVPQSSQIYFSPQFDEWKHILSKALTAIEAQEFEKVVLARKTLVELSKPISAAQLLKSSREQNHNSFHFLVSLAPNRSFVGSTPERLYRRSGDQVETEALAGTIGRSDDLVEDKKLSDWLMNDDKNQRENQIVVNDIIDRLGPYTENIAVHPEVQLIQLRRVQHLKRHINGRLSSEVKGIQLLSALQPTAAIAGLPREASLNFIRMNEPFTRGWYSGSLGYFGHHQAEFCVSIRSASLVDNTVKLYAGAGIVPGSEAEFEWQELNRKTATLLNLITDYPIENERGETV

SEQ ID NO: 95075 - protein, 435 aa, Vibrio anguillarum
  REGION 1..435: note = tr|A0A1Y0NVT3|A0A1Y0NVT3_VIBAN Isochorismate synthase MenF OS=Vibrio anguillarum OX=55601 GN=menF PE=3; SV = 1
MSHFHQAIARLIEQINDAKDDDVRFVQILQEAPPFAPIDWLEAQPIFPKFYWQSRDTREEVVALGQLYTFSEAEPAYAILGQEQRVWGGRSFDGHTDKNRRCLSSFFFLPQIELICCDGQWSLAANITAERQRTLVALHKLQLEVSPLRGMTSHIKQVTHQPNEVKWQQLVNQVLEGIDHQAFKKVVLARQTTLSLDKPLSAAQLLKASAAHNHHSFHFLLAFDQKHSFMGSTPERLYARQGQTLYTEALAGTIGRGENASQDMELSHWLTQDSKNLNENQYVVDDIIERLTPHSERVDVEQDVRLVRLRKVQHLKRGIHAQLKKGVNGVQLLNALQPTAAVAGLPRKAAMDFIQANEPFARGWYAGSVGYFSHQQAEFCVAIRSALLVDNQVQLFAGAGIVPGSVAEHEWQELDKKMATLLSLISDHFPLGVAS

SEQ ID NO: 95076 - protein, 435 aa, unidentified
  source 1..435: note = Vibrio antiquarius
  REGION 1..435: note = tr|A7K663|A7K663_VIBAE Isochorismate synthase MenF; OS = Vibrio antiquarius (strain Ex25) OX=150340 GN=menF PE=3; SV = 1
MSQFHQAVKRIIERVQQAEGNQTRLVEPLSEKPNFSFIDWLDAQPLFPKFYWQSRDTREEVVALGQLHAFVEPGPAYTILGEGQRVWGGRSFDGQHEKNRRCMPSFFFLPQIELIRFDQQWSLAVNISEDKARTLAGLHKLVCEVATLAPISSHIRSIVHTPSQPQWNELVHKVLTGIKNDDFKKVVLARRSTVQLDNTLSAAQLLKASYLNNHHSFHFMLSLDSKHSFMGSTPERLYSRVGHELHTEALAGTIGRGDNATHDMELANWLSQDEKNLNENQYVVDDIIDRLSPHSEAVEVEAEASLVRLRKVQHLKRNIHASLKTGINGVQLLSALQPTAAVAGLPRQESMQFILDNEPFARGWYAGSMGYISHERAEFCVAIRSALVLGDQVQLFAGAGIVPGSVAEHEWAELDKKMSTLLTLISDHPPLGVAS

SEQ ID NO: 95077 - protein, 393 aa, Vibrio atlanticus
  REGION 1..393: note = tr|A0A558GY25|A0A558GY25_9VIBR Isochorismate synthase OS=Vibrio atlanticus OX=693153 GN=FQP88_12800; PE = 4 SV=1
MKREVIGYSKMESDLLDRELLSSPFFFASPNNTMMGKGIENEFHQPIAFSELAEKANEMLQAAKKSEADNPVLFGVVPFNEENPTKFIIPEQLFISSSTRSLHSNPLSSADAHVISSPSGNHYKQGVSDLLDMFANTELSKVVLSRAIEVETDADIQQQTLLRNLLSINSKGYTFAANINDNQKLMGASPELLVAKKGSYLTSNPLAGSRPRSELDEQNQSSTNSLLNTNKDLHEHGLVVEEVERVMSKYCHNLYTPMIPSVIETKTMLHLSTVLEGQVNNPHTNVLEVAAELHPTPAVCGYPRQKAYEAIRKLEQFDRGYFTGMVGWCDSRGNGEWVVTIRCAEVQKRQMKVFAGAGIVDESHPQSELDETGAKMNTILTAAGIQLKDMLTA

SEQ ID NO: 95078 - protein, 437 aa, Vibrio azureus
  REGION 1..437: note = tr|U3C7T8|U3C7T8_9VIBR Isochorismate synthase MenF; OS = Vibrio azureus NBRC 104587 OX=1219077 GN=menF PE=3 SV=1
MSSFDQVVQSLIQRIEVADDEITRIVESMNEPPCFELLDWLEAQPLFPKFYWQSRNSYEEVVALGQHHTFDEPGPAYAMLSSGQRVWGGCGFDHLKTQSNLNQSAWFFLPKIELIRRQNRWSLAVNLSGDNASTIEDLRQLIADVTELTAVNTSICSIKHSPNRFEWQRLVEQALAEIGQHQFKKVVLARQSTLKLDSSLSAAQLLKSSTIHNHDSFHFLLSLNRQQSFIGSTPERLYSRVGRTLKTEALAGTVGRGDNAAQDNAFANWLTQDVKNLKENQYVVDDIVESLSPYIETIDVESNPSLVRLKQVQHLRRRIEVTLKPEINGVQLLAALQPTAAVAGLPRQSSMQFILNNEPFSRGWYAGSIGYLSHESAQFCVAIRSALVMEGSVQLFAGAGIVPGSIAEQEWAELEKKTSTLLTLISESTSAREYHES

SEQ ID NO: 95079 - protein, 435 aa, unidentified
  source 1..435: note = Vibrio barjaei
  REGION 1..435: note = tr|A0A1J4R7I0|A0A1J4R7I0_9VIBR Isochorismate synthase MenF OS=Vibrio barjaei OX=1676683 GN=menF PE=3; SV = 1
MSHLTKAITQLVEKLERAPQGTKRLEQELQGSPKTHGIDWLDAQPHYPKFYWQSRDTREEVVALGQLHTFSEAAPAYTILSEKQRVWGGRSFDGHSDKNRRCMSAFFFLPQIELIRFDEGWRLAVNIGMSKEVSIRALKQLVADAKELAPLASDIVSLRHTPEKAQWCDLVDDVLAGIQQDKFKKVVLARKTCVDLKHSISPAQLLKASYAQNHHSFHFLMALSPGHAFVGSTPERLYRRVGQELETEALAGTIGRGGNAAQDMELANWLTQDDKNINENQYVVDDILQSLSPHSDQVHLESELRLVRLRKVQHLKRNILAHLHKGINGVQLLQALQPTAAVAGLPRAEAIQYIQQNEPFARGWYAGSVGYLSHEKAEFCVAIRSALLVKDELQLFAGAGIVPGSIAEHEWQELDKKMSTLLSLISDQPSLGVAS

SEQ ID NO: 95080 - protein, 435 aa, unidentified
  source 1..435: note = Vibrio bivalvicida
  REGION 1..435: note = tr|A0A177XZ16|A0A177XZ16_9VIBR Isochorismate synthase MenF OS=Vibrio bivalvicida OX=1276888 GN=menF; PE = 3 SV=1
MSYFHQAVTELIERVKEAEDGVNRLVQVLEEKPDFAFIDWLEAQPLFPKFYWQSRDTREEVVALGQLHTFVEPAPAYTILAEDQRIWGGRSFDGHTGKNRRCMSSFFFLPQIELIRFDERWSLAVNLNAEKHRTLASLYKLQLEVSPILPVSSHIETIQHTPEKGQWSQLVDKVLTGIKNDEFKKVVLARKTEVNLDRPLCASQLLKASYLQNHHSFHFLLSLDKKHSFLGSTPERLYARQGQELYTEALAGTIGRGINASQDMELANWLSNDVKNLNENQYVVDDIIDRLTPHSEHVEVEQEARLVRLRKVQHLKRSIHAHLRKGVNGVQLLSALQPTAAVAGLPREESMAFIQKNEPFARGWYAGSMGFISQQRAEFCVAIRSALVLNDQVQLFAGAGIVPGSVAEYEWQELDKKMSTLLSLISDNPPLGVAS

SEQ ID NO: 95081 - protein, 446 aa, Vibrio brasiliensis
  REGION 1..446: note = tr|E8LQW1|E8LQW1_9VIBR Isochorismate synthase MenF; OS = Vibrio brasiliensis LMG 20546 OX=945543 GN=menF PE=3; SV = 1
MNNNPHAYEADLSNFHQAVTELIERVKEAEDGVTRLVQVLEEKPDFAFIDWLEAQPIFPQFYWQSRDTREEVVALGQLHTFVEPAPAYAILAEDQRIWGGRSFDGQTDKNRRCMSSFFFLPQIELIRFDDRWSLAVNLTAEKHRTLASLCKLQLDVNPLMPVSAHIENIQHTPEKAQWSELVDKVLTGIENDEFKKVVLARKTAVTLDQPLCAAQFLKSSYLHNHHSFHFMLSLDRKHSFIGSTPERLYLRQDQELYTEALAGTIGRGSNASQDMELANWLANDSKNLNENQYVVDDIIERLTPHSEHVEVEQEARLVRLRKVQHLKRSIHAHLNKGVNGVQLLSALQPTAAVAGLPRKESMAFIQQHEPFARGWYAGSMGFISHQRAEFCVAIRSALIVDDQVQLFAGAGIVPGSIADHEWQELDKKMSTLLSLISDNPPLGVAS

SEQ ID NO: 95082 - protein, 434 aa, Vibrio breoganii
  REGION 1..434: note = tr|A0A193KA08|A0A193KA08_9VIBR Isochorismate synthase MenF OS=Vibrio breoganii OX=553239 GN=menF PE=3; SV = 1
MSHLANAIKQLAQQVESAPRDVCRVEVAIEELCADSVLPWMGNQSLFPKFYWQSRDTTEEVVALGQARTFNEINPAYSVLNQDQRIWGGYAFPYKENKGRCLSSFFFLPHIELVRRKQDWFLAANLMEDRDAVRRAVYRLNGDTMSLSEHMPAVTDVLHTPNKELWNDNVELALETIHNSDLKKVVLARQTTIKLDSVLQGIELLALSRKQNRHSFHFLFQLEEGHSFIGSTPERLYSRRGQLIETEALAGTIGRHSNPAQDLQLANWLINDKKNLQENQYVVDDIVESLAPFCSNIEVEGEARLVRLRRVQHLKRHIQAELTKHADRGRLLQALQPTAAVAGLPRSLALEFIECHEPFSRAWYSGSVGYISEQSAEFCVAIRSALVQEDNLHLFAGAGIVPGSQAEHEWQELDKKMSTLLSLITEQSVLEQAS

SEQ ID NO: 95083 - protein, 435 aa, Vibrio campbellii
  REGION 1..435: note = tr|A0A344KGW8|A0A344KGW8_9VIBR Isochorismate synthase MenF OS=Vibrio campbellii OX=680 GN=menF PE=3 SV=1
MSQFHQAVKRIIERVQQTEGNQTRLVEPLSEKPSFAFIDWLEAQPLFPKFYWQSRDTREEVVALGQLHSFVEPGPAYIILGEGQRVWGGRSFDGQHEKNRRCMPSFFFLPQIELIRFDQQWSLAVNISEDKTRTLAGLKKLVCGVPSLAPISSHIRSIDHAPTQPEWNALVEKVLTGIDNDEFKKVVLARKSTVMLDSTLSAAQLLKASYLNNHHSFHFLLSLDSKHSFMGSTPERLYSRVGHELHTEALAGTIGRGGNATQDMELANWLSQDSKNLNENQYVVDDIIDRLTPHSERVEVENEPRLVRLRKVQHLKRSINVDLKAGINGVQLLSALQPTAAVAGLPRKASMQFILDNEPFARGWYAGSMGYISHERAEFCVAIRSALVLSDQVQLFAGAGIVPGSIAEHEWAELDKKMSTLLSLISDHPPLGVAS

SEQ ID NO: 95084 - protein, 435 aa, unidentified
  source 1..435: note = Vibrio caribbeanicus
  REGION 1..435: note = tr|A0A0A6QTP4|A0A0A6QTP4_9VIBR Isochorismate synthase MenF OS=Vibrio caribbeanicus OX=701175 GN=menF; PE = 3 SV=1
MSYFHQAVTELIERVKDAKDGVTRLVQVLEEKPDFAFIDWLEAQPLFPKFYWQSRDTREEVVALGQLHTFVEPAPAYAILADDQRIWGGRSFDGQTDKNRRCMSSFFFLPQIELIRFDETWSLAANLSADKHRTLASLYKLQHEVTPLLPVSAHIEHIQHTPEKAEWSQLVEKVLTGIENNDFKKVVLARKTAVTLSAPLCASQFLKSSYLHNHHSFHFMLSLDRKHSFIGSTPERLYLRQGQELYTEALAGTIGRGLNASQDMELANWLANDSKNLNENQYVVDDIIERLSPHSERVEVEQEARLVRLRKVQHLKRSIHAHLHKGVNGVQLLSALQPTAAVAGLPRKESMAFIRENEPFARGWYAGSMGFISHQRAEFCVAIRSALVLNDQVQLFAGAGIVPGSVAEYEWQELDKKMSTLLSLISDNPPLGVAS

SEQ ID NO: 95085 - protein, 438 aa, Vibrio casei
  REGION 1..438: note = tr|A0A368LM50|A0A368LM50_9VIBR Isochorismate synthase MenF OS=Vibrio casei OX=673372 GN=menF PE=3 SV=1
MSGLNQVIESLIEKIRNGQVSSENRISQPVNFPASFNAIDWLQEQILYPRFYWQSRDEREEVVALEQIHTFTDPIAAYAILGPQQRVWGGKAFDSEHAKTRHQSSYFFLPKIELMRQDDNWSLNVNLSDDHERTIRDLKKLKADYQPSAPLQPQSSTVHYSPQCDEWKHILEKALIAIESKEFEKVVLARKTIVELDQPIQAAQLLKASRVQNRNSFHFLMSLSPNDSFLGSTPERLYHRSGDMLETEALAGTIGRDDNPEKDKQLADWLLNDDKNLRENQIVVNDIIERLTPYTETIDVQPEAQLIQLRRVQHLKRHINGNLSLGVKGVQLLTALQPTAAIAGLPREASLNFIRVNEPFTRGWYSGSLGYFGHHKAEFCVCIRSAVVTENTVKLYAGAGIVPGSEAEFEWQELNRKTATLLNLISDYPIENDHCEGL

SEQ ID NO: 95086 - protein, 435 aa, Vibrio celticus
  REGION 1..435: note = tr|A0A1C3JFN8|A0A1C3JFN8_9VIBR Isochorismate synthase MenF OS=Vibrio celticus OX=446372 GN=menF PE=3; SV = 1
MSHFQQTISALIERVQNAQASEVRCVEVLTQKPSFAFIEWLHAQPLFPKFYWQSRDTREEVVALGQLHTFSDPAPAYAILGEDQRIWGGRSFDGHTAKNRRCMESFFFLPQVELIRFDNTWSLAVNLSPDRVSSINALNKLSVEAAILAPLSAHIEQINHVPEREQWGNLVDKVLQGISDEEYKKVVLARKTTLQLDAPICAAQLLKASYLQNHHSFHFMLVLDSKHSFIGSTPERLYSRHGTELDTEALAGTIGRGENATEDMELANWLSQDSKNLNENQYVVDDIIERLTPHSQKVHVEKDTRLVRLRKVQHLKRNIHAQLNNGVNGVQLLAALQPTAAVAGLPRKEAMDFILEHEPFARGWYAGSVGYISHQRAEFCVAIRSALIVNDQVQLFAGAGIVPGSVAEHEWQELNKKMSTLLSLISDHPPLGVAS

SEQ ID NO: 95087 - protein, 435 aa, Vibrio chagasii
  REGION 1..435: note = tr|A0A2S7VIG6|A0A2S7VIG6_9VIBR Isochorismate synthase MenF OS=Vibrio chagasii OX=170679 GN=menF PE=3; SV = 1
MSHFQQTISALIERVQNAQASEVRCVEALTQKPSFAFIEWLHAQPLFPKFYWQSRDIREEVVALGQLHTFSDPAPAYAILGEDQRIWGGRSFDGHTEKNRRCMESFFFLPHIELLRFDDTWSLAVNLSSDRVASINALNKLAVDAAILAPLSAHIEQINHVPEREQWGGLVEKVLKGISDEEYKKVVLARKTTLKLDAPICAAQLLKASYLQNHHSFHFMLVLDSKHSFIGSTPERLYSRHGTELDTEALAGTIGRGENATEDMELANWLSQDTKNLNENQYVVDDIIERLTPHSQSVHVEKEARLVRLRKVQHLKRNIHAQLNNGVNGVQLLAALQPTAAVAGLPRKEAMDFILEHEPFARGWYAGSVGYISHQRAEFCVAIRSALVVNDQVQLFAGAGIVPGSVAEHEWQELNKKMSTLLSLISDHPPLGVAS

SEQ ID NO: 95088 - protein, 395 aa, Vibrio cholerae
  REGION 1..395: note = tr|A0A0H3AK03|A0A0H3AK03_VIBC3 Vibriobactin-specific isochorismate synthase OS=Vibrio cholerae serotype O1 (strain ATCC 39541 / Classical Ogawa 395 / O395); OX = 345073GN=vibC PE=4 SV=1
MVMKREVVGYTTMSEHLIDTQLTRSPFFFASANQSMLGCGVAHAFQQAIPFAELANQAKQLLQQAKRDECDNPLLFGIVPFDPKTPTRFMIPRTLYVSSSPRLNRPAHLTRQVAKLISSPSGEQYKQGVSHLLNMFHHSGLSKVVLSRAIEIATEQEIALPTLLRSLLAINHHGYTFAASLDEQRKLIGASPELLVAKRGNYLISNPLAGSRPRSQDAQENAQRRASLLNTAKDLHEHGLVVEEVERIMSRYCRNLYTPMVPSVIETETMLHLSTLLEGQVSDPEVCALQVAADLHPTPAVCGFPRESAYQAIRELEEFDRGYFTGMVGWCDARGNGEWVVTIRCAEVGSHQMKLFAGAGIVDESLPQSELEETGAKMKTILAAAGIELNDVLTA

SEQ ID NO: 95089 - protein, 440 aa, unidentified
  source 1..440: note = Vibrio cidicii
  REGION 1..440: note = tr|A0A151JK16|A0A151JK16_9VIBR Isochorismate synthase MenF OS=Vibrio cidicii OX=1763883 GN=menF PE=3; SV = 1
MFEVDLSYFHQAIGQLIERVKNAGEDESRLIEPIDTALKFTLIDWLEAQPIFPKFYWHSRDGREQVVALGQLHTFTEPAPAYAILAPGQRVWGGRSFDGLSEKNRRCMSSFFFLPQIELLQQDGKLSLAVNLGAERSRLLASLRKLACDVPLLAPLAAHICHIDHLPSQEQWQSLVDKVLHGIEQNAFKKVVLARKTSVQLDTPLCASQLLKASAQHNHHSFHFMLSLDRKHSFIGSTPERLYLRHDRELHTEALAGTIGRGVNATHDLELANWLAQDAKNLNENQYVVDDIVERLTPHAETVQVEAEPRLVRLRKVQHLKRDIHAHLKEGINGVQLLSALQPTAAVAGLPRQASMQFILDNEPFSRGWYAGSVGYLSHDKAEFCVAIRSALIVDDELQLFAGAGIVPGSIAKHEWAELDKKMSTLLSLIAEYPPLGVAS

SEQ ID NO: 95090 - protein, 458 aa, Vibrio cincinnatiensis
  REGION 1..458: note = tr|A0A1T4L6C4|A0A1T4L6C4_VIBCI Isochorismate synthase MenF OS=Vibrio cincinnatiensis DSM 19608; OX = 1123491 GN=menF PE=3 SV=1
MISTGTLNRVATVKSNLILDEVALSHFYQAIARLIEQINDARDNDVRFTQELAVKPPFAFIDWLEAQPVFPKFYWQSRDTREEVVALGQLYTFSDPAPAYAIVGEQQRIWGGRSFDGQTKKNRRCMSSFFFLPQVELIRFDDRWSIAANVNQDRQRTLATLRQLQHEVVPLASLHNEVLQVTHSPNLSDWTNLVHQVLDGIHNHAFQKVVLARQTRITLNQPIRASQLLKASYLENHHSFHFLLALDRQHSFMGSTPERLYYRQGLELQTEALAGTIGRGSDTSQDEQLADWLTHDSKNLNENQFVVDDIIERLTPYSEQVSVEPEAHLVRLRKVQHLKRCIHAQLKPGVNGVQLLRALQPTAAVAGLPRQAALDFITQHEPFARGWYAGSMGYFSQQKAEFCVAIRSALVVDDEVQLFAGAGIVPGSIAEHEWQELDKKMSTLLSLITDSLPLGLAS

SEQ ID NO: 95091 - protein, 434 aa, Vibrio comitans
  REGION 1..434: note = tr|A0A4Y3ISF8|A0A4Y3ISF8_9VIBR Isochorismate synthase MenF OS=Vibrio comitans NBRC 102076 OX=1219078; GN = menF PE=3 SV=1
MSHLANAIKQLAQQVESAPSDVCRVEVAIEELSADSVLPWMGNQSLYPKFYWQSRDTTEEVVALGQARTFNEINPAYSVLNQGQRIWGGYAFPYKEMKGRCLNSFFFLPHIELVRRKQDWFLAANLMEDRDAVRRAVYRLNGDLMQLSEQLPAVRDVLHTPNKELWNDNVELALETIHNSDLKKVVLARQSTIKLDSALQGIELLALSRKQNRHSFHFLFQLEEGHSFIGSTPERLYSRRGQLIETEALAGTIGRHSNPAQDLQLANWLINDKKNLQENQYVVDDIVESLAPFCSNIEVESEARLVRLRRVQHLKRHIQAELTKHADRGRLLQALQPTAAVAGLPRRLALEFIERHEPFSRAWYSGSVGYISEQSAEFCVAIRSALVQEDNLHLFAGAGIVPGSQAEHEWQELDKKMSTLLSLITEQSVLEQAS

SEQ ID NO: 95092 - protein, 435 aa, Vibrio coralliilyticus
  REGION 1..435: note = tr|A0A2A2MMV7|A0A2A2MMV7_9VIBR Isochorismate synthase MenF OS=Vibrio coralliilyticus OX=190893 GN=menF; PE = 3 SV=1
MSHFHQAVIELIERVKDAEDGVNRLVQVLEEKPDFAFIDWLEAQPIFPKFYWQSRDTREEVVALGQLHTFVDPAPAYTILADDQRIWGGRSFDGQTEKNRRCMSSFFFLPQIELIRFDNCWSLAVNLTADKHRTLAGLSKLKVEAGSLLPVSAQIKSISHIPEKPQWSELVEKVLTGIENDDFKKVVLARRTSVQMDSTVSAAQLLKSSYLQNHHSFHFMLSLDKKHSFIGSTPERLYARQGQELYTEALAGTIGRGDNASHDMELANWLSQDSKNLNENQYVVDDIIDRLTPHSEHVEVEQEARLVRLRKVQHLKRSIHAHLKPGINGVQLLGALQPTAAVAGLPRKESMAFIQNNEPFARGWYAGSMGFISHQRAEFCVAIRSALILGEEVQLFAGAGIVPGSVADNEWQELDKKMSTLLSLITDIPPLGVAS

SEQ ID NO: 95093 - protein, 435 aa, Vibrio crassostreae
  REGION 1..435: note = tr|A0A4V2RUL2|A0A4V2RUL2_9VIBR Isochorismate synthase MenF OS=Vibrio crassostreae OX=246167 GN=menF; PE = 3 SV=1
MSHFQQTISALIERVQNAQASEVRCVEVLTQKPSFAFIEWLHAQPLFPKFYWQSRDTREEVVALGQLHTFSDPAPAYAILGEDQRIWGGRSFDGHTAKNRRCMESFFFLPQVELIRFDNTWSLAVNLSPDRVASINALNKLSVEAAILAPLSAHIEEINHVPEREQWGGLVEKVLKGISDEEYKKVVLARKTTLQLDAPICAAQLLKASYLQNHHSFHFMLVLDSKHSFIGSTPERLYSRHGTELDTEALAGTIGRGENATEDMELANWLSQDTKNLNENQYVVDDIIERLTPHSQSVHVEKEARLVRLRKVQHLKRNIHAQLNNGVNGVQLLAALQPTAAVAGLPRKEAMDFILEHEPFARGWYAGSVGYISHQRAEFCVAIRSALVVNDQVQLFAGAGIVPGSVAEHEWQELNKKMSTLLSLISDHPPLGVAS

SEQ ID NO: 95094 - protein, 435 aa, Vibrio diabolicus
  REGION 1..435: note = tr|A0A2L2K3A8|A0A2L2K3A8_9VIBR Isochorismate synthase MenF OS=Vibrio diabolicus OX=50719 GN=menF PE=3; SV = 1
MSQFHQAVKRIIERVQQAEGNQTRLVEPLSEKPNFSFIDWLDAQPLFPKFYWQSRDTREEVVALGQLHAFVEPGPAYTILGEGQRVWGGRSFDGQHEKNRRCMPSFFFLPQIELIRFDQQWSLAVNISEDKARTLAGLHKLVCEVATLAPISSHIRSIVHTPSQPQWNELVHKVLTGIKNDDFKKVVLARRSTVQLDNTLSAAQLLKASYLNNHHSFHFMLSLDSKHSFMGSTPERLYSRVGHELHTEALAGTIGRGDNATHDMELANWLSQDQKNLNENQYVVDDIIDRLSPHSEAVEVEAEASLVRLRKVQHLKRNIHASLKTGINGVQLLSALQPTAAVAGLPRQESMQFILDNEPFARGWYAGSMGYISHERAEFCVAIRSALVLGDQVQLFAGAGIVPGSVAEHEWAELDKKMSTLLTLISDHPPLGVAS

SEQ ID NO: 95095 - protein, 435 aa, Vibrio diazotrophicus
  REGION 1..435: note = tr|A0A2J8GSZ2|A0A2J8GSZ2_VIBDI Isochorismate synthase MenF OS=Vibrio diazotrophicus OX=685 GN=menF PE=3; SV = 1
MSKFYQAVAQLIEQVSNARENDVRFVQELADKPPFAFIDWLEAQPIFPKFYWQSRDTRDEVVALGQLYTFTEPEPAYAILGEGQRVWGGRSFDGRTEKNRYCMASFFFLPQIELIRFDDKWSLAANVSHEKHRTLATLNKLLVDITPIRTLQSDIVHVTHTPDENGWNHLVEKVLHGIEQKEFKKVVLARKTSLQLDSNLSAAQLLKASYAQNHHSFHFLLSIDTKHSFMGSTPERLYYRQGSELQTEALAGTIGRGHNASQDLELANWLTQDTKNLNENQLVVDDIVERLEPHSHQVFVEEEARLVRLRKVQHLKRSIRAELKQGINGIQLLSALQPTAAVAGLPRKEALDFITQNEPFARGWYAGSMGYFSHQKAEFCVAIRSALVLEKEVQLFAGAGIVPGSVAEHEWQELDKKMSTLLSLISDKLPLGVAS

SEQ ID NO: 95096 - protein, 435 aa, unidentified
  source 1..435: note = Vibrio europaeus
  REGION 1..435: note = tr|A0A178JGR8|A0A178JGR8_9VIBR Isochorismate synthase MenF OS=Vibrio europaeus OX=300876 GN=menF PE=3; SV = 1
MSYFHQAVAELIERVKEAEDGVNRLVQVLEEKPDFAFIDWLEAQPLFPKFYWQSRDTREEVVALGQLHTFVEPAPAYTILADDQRIWGGRSFDGHTGKNRRCMSSFFFLPQIELIRFDQQWSLAVNLNAEKHRTLASLYKLQLEVSPILPVSSHIETIQHTPEKEQWSQLVDKVLTGIKNDEFKKVVLARKTEVNLDRPLCASQLLKASYLQNHHSFHFLLSLDKKHSFLGSTPERLYARQGQELYTEALAGTIGRGSNASQDMELANWLSNDIKNLNENQYVVDDIVERLTPHSEHVEVEQEARLVRLRKVQHLKRSIHAHLNKGVNGVQLLSALQPTAAVAGLPREESMAFIQEHEPFARGWYAGSMGFISHQRAEFCVAIRSALVLNDQVQLFAGAGIVPGSIAEHEWQELDKKMSTLLSLISDNPPLGVAS

SEQ ID NO: 95097 - protein, 434 aa, Vibrio ezurae
  REGION 1..434: note = tr|U3CQF4|U3CQF4_9VIBR Isochorismate synthase MenF; OS = Vibrio ezurae NBRC 102218 OX=1219080 GN=menF PE=3 SV=1
MSHFANAIQQLAQHIESAPIDACRIEVPVEEVCTDSVLPWMENQPLFPKFYWQSRDTTEEVVALGQARTFNEINPAYSMLNHKQRIWGGYAFPYKDNKGRCLSSFFFLPHIELVRRNQDWFLAANLMEDRDAVRRAVYLLCADTLPLPNSLPAVKNVTHTPRKALWNNTVELALQAITTTELKKVVLARQTTIKLDSALKGVELLALSRKQNRHSFHFLLQLEQGHSFIGSTPERLYSRRGQLIETEALAGTIGRHSHPAQDLELANWLINDKKNLQENQYVVDDIVERLTPFCNNVEVDDEARLVKLRRVQHLKRHIQAELSKHADKSKLLEALQPTAAVAGLPRHLALEFIEQNEPFSRAWYSGSVGYISDQNAEFCVAIRSALVQDDNLHLFAGAGIVPGSEAEHEWQELDKKMSTLLSLITEQSVLEQAS

SEQ ID NO: 95098 - protein, 393 aa, Vibrio fluvialis
  REGION 1..393: note = tr|A0A1L9L0H6|A0A1L9L0H6_VIBFL Isochorismate synthase DhbC OS=Vibrio fluvialis OX=676 GN=dhbC PE=4 SV=1
MKREVIGYTKMANELLDNELSSSPFFFASPNNTMMGIGVQEERLQTLPFSELADVANNMLKNAKTSESDNPVLFGVVPFNQENMTRFVIPKTLYISSSTRASHTSASSAPQARLISSPSGHYYKQGVHDLLGMFANQELSKVVLSRAIEVATETDIQQQALLRNLLSINAKGYTFAAQIGDNQKLMGASPELLVAKKGSHLISNPLAGSRPRSESEQQNQASIQSLLNTGKDLHEHGLVVEEVERVMSKYCCNLYTPMVPSVIETQTMLHLSTQLEGQVLDPAINVLQVAAELHPTPAVCGYPREKAYEAIKRLEQFDRGYFTGMVGWCDSRGNGEWVVTIRCAEVQPRRMKVFAGAGIVNESQPQSELDETGAKMNTILKAAGIQLNEMLTA

SEQ ID NO: 95099 - protein, 435 aa, Vibrio fortis
  REGION 1..435: note = tr|A0A066UXD6|A0A066UXD6_9VIBR Isochorismate synthase MenF OS=Vibrio fortis OX=212667 GN=menF PE=3 SV=1
MSHFQQTICALIERVQNAQAGEVRCVEVLKQKPPFAFIEWLHAQPLFPKFYWQSRDTREEVVALGQIHTFSDPAPAYAILGDDQRIWGGRSFDGHTEKNRRCMESFFFLPQIELIRFDDKWSLAVNLTPDRVASINALKKLSVDAAILAPLSAHIEHIDHLPEQPEWNGLVEKVLTGIDNNDFKKVVLARKTTVHLDEPICAAQLLKASYQKNHNSFHFMLVLDSKHSFIGSTPERLYSRHGTELDTEALAGTIGRGKNASSDMELANWLTQDQKNLNENQYVVDDIIDRLTAYSHSVNVEKEARLVRLRKVQHLKRHIHAQLHAGVNGVQLLGTLQPTAAVAGLPRKESMDFILKHEPFARGWYAGSVGFISHQRAEFCVAIRSALIVGDQVQLFAGAGIVPGSVAEHEWQELNKKMSTLLSLISEHPPLGVAS

SEQ ID NO: 95100 - protein, 435 aa, Vibrio furnissii
  REGION 1..435: note = tr|A0A0Q2XZF5|A0A0Q2XZF5_VIBFU Isochorismate synthase MenF OS=Vibrio furnissii OX=29494 GN=menF PE=3; SV = 1
MSNFHQAIARLIEQINDARDNDVRFTQELAEKPPFAFIDWLEAQPVFPKFYWQSRDTREEVVALGQLYTFSDPAPAYTILGDDQRVWGGRSFDGQTDKNRRCMSSFFFLPQVELIRFDQTWTLAANVSHERHRTLATLQKLLTDVTPLRALNCEVTDVQHAPTESGWATLVDQVLDGITHNAFKKVVLARQTSLTLDRPISAAQLLKASYDQNHNSFHFLLALDAKHSFMGSTPERLYFRQGLDLHTEALAGTIGRGQNATQDMALSNWLAQDTKNLNENQYVVDDIVDRLTPHAETVTVEQEAHLVRLRKVQHLKRRIHAQLNAGVNGVQLLSALQPTAAVAGVPRKEAFDFITQHEPFARGWYAGSMGYFSHQQAEFCVAIRSALVLEQEVQLFAGAGIVPGSVAEYEWQELDKKMSTLLSLITDRLPLGVAS

SEQ ID NO: 95101 - protein, 435 aa, unidentified
  source 1..435: note = Vibrio galatheae
  REGION 1..435: note = tr|A0A0F4NKX0|A0A0F4NKX0_9VIBR Isochorismate synthase MenF OS=Vibrio galatheae OX=579748 GN=menF PE=3; SV = 1
MSYFHQAVAELIERVKEAQDGVHRLVQVLEEKPDFAFIDWLEAQPLYPKFYWQSRDTREEVVALGQLHTFVEPAPAYTILGEDQRIWGGRSFDGQTDKNRRCMASFFFLPQIELIRFDQHWSLAVNLNTEKHRTLASLYKLQYEVKALLPVSSHIDTIQHTPEKAQWSQLVDKVLSGIDNQQFKKVVLARKTEVHLDRPLCASQLLKASYEQNHHSFHFLFSLDKKHSFVGSTPERLYARQGQELYTEALAGTIGRGSNASHDMELANWLSNDAKNLNENQYVVDDIIDRLTDYSEQIEVESEARLVRLRKVQHLKRSIHAHLHKGVNGVQLLGALQPTAAVAGLPREASMEFIQENEPFVRGWYAGSMGFISLQRAEFCVAIRSALVLEDQVQLFAGAGIVPGSVAEHEWQELDKKMATLLSLISDNPPLGVAS

SEQ ID NO: 95102 - protein, 435 aa, Vibrio gazogenes
  REGION 1..435: note = tr|A0A1Z2SIR2|A0A1Z2SIR2_VIBGA Isochorismate synthase MenF OS=Vibrio gazogenes OX=687 GN=menF PE=3 SV=1
MSYFYQAVNQLIHQIHQASPQVSRCQQALDFPPHFALPDWLAAQTLFPKFYWQDRDSREEVVALGACVTFSDPAPAYQVISDSQRIWGGRSFDGGTTKNPHCKEAFFFLPQIELIREGHSWFLCANLTQARDTTIQALRQLQYEIPALPPIATEVLSVDHAPQRAQWCQLVEQALSAMTQQQFDKVVLARQSTFQLTQSIQAAQLLKESRRQNDQSFHFLLAIDQRHSFVGSTPERLYQRHGEALFTEALAGTIGRSDDIQQDQALSDWLIHDDKNVTENQYVVDDIVDRLTPLARSVDVGAETELVKLRRVQHLKRHITAELNPTINGVQLLGALQPTAAVAGLPRQAAKTFIERYEPFCRGWYAGSIGYISHQRAEFCVAIRSALVMDKQVKLFAGAGIVSGSVAEHEWLELDRKMSTLLSLITEISPEEVVS

SEQ ID NO: 95103 - protein, 440 aa, unidentified
  source 1..440: note = Vibrio genomosp.
  REGION 1..440: note = tr|A0A1E5D242|A0A1E5D242_9VIBR Isochorismate synthase MenF OS=Vibrio genomosp. F6 str. FF-238; OX = 1191298 GN=menF PE=3 SV=1
MYEVDLSHFYQAIQTLVERVKSSTPKEVRLVERLDEKPPFVFIDWLEAQPIFPKFYWQSRDTREEVVALGKVHTFSDPAPAYTILGEGQRIWGGRSFDGHTEKNRRCMESFFFLPQIELIRYDDQWSLAVNLPSEKQTLINALNKIVCDVPSLLPLSAQIEHTEHTPSKAIWADLVERVLSGIEADDFKKVVLARKTVLKLDAPICSAQLLKASYEQNHHSFHFMMSLDSKHSFMGSTPERLYSRFGQELHTEALAGTIGRGKNATQDMELANWLSQDAKNLNENQYVVDDIVERLTQHSETVNVQQEARLVRLRKVQHLKRSIHAQLKPNTNGVQLLGALQPTAAVAGLPRAEAMQFIQENEPFARGWYAGSVGYISHQKAEFCVAIRSALIVDNQVQLFAGAGIVPGSNAEHEWQELNKKMATLLSLISDNPPLGVAS

SEQ ID NO: 95104 - protein, 434 aa, Vibrio halioticoli
  REGION 1..434: note = tr|V5FB96|V5FB96_9VIBR Isochorismate synthase MenF; OS = Vibrio halioticoli NBRC 102217 OX=1219072 GN=menF PE=3; SV = 1
MSYFANAIKQLAQHVETAPIDACRIEVPVEEVCVDSVLPWMENQPIFPKFYWQSRDTTEEVVALGQARTFNEINPAYSMLNENQRIWGGYAFPYKNKKGRCLKSFFFLPHIELVRRNQDWFLAVNLMQDRDAVRRAVHLLNNDTLSFSTPLPAVTKVTHTPDQALWTRNVDLALESISSSELKKVVLARKTTVKLDSTLKGVELLALSREQNRHSFHFLLQLEEGHSFIGSTPERLYSRRGQLIETEALAGTIGRHSKPSQDLELANWLIHDKKNLQENQYVVDDIVDSLAPFCSNVEVEDEARLVKLRRVQHLKRHIQAELSKHADKSKLLQALQPTAAIAGLPRHLALEFIEQNEPFSRSWYSGSVGYISDQSAEFCVAIRSAMVQGDDLHLFAGAGIVPGSEAEHEWQELDKKMSTLLSLITEQSVLEQAS

SEQ ID NO: 95105 - protein, 435 aa, Vibrio hangzhouensis
  REGION 1..435: note = tr|A0A1H6C3B7|A0A1H6C3B7_9VIBR Isochorismate synthase MenF OS=Vibrio hangzhouensis OX=462991 GN=menF; PE = 3 SV=1
MSHLTKAITQLLEQLERVPQGTKRLEQDLHGAPKTHCIDWLDSQPHFPKFYWQSRDTREEVVALGQLHTFSEPAPAYTILGDRQRIWGGRSFDGHSDKNRRCMSAFFFLPQIELIRYDSGWRLAVNIGMSVDVTIKALKQLVVDTTELPPLSTAILSLDHTPDKAQWSHLVEDVLTGIEQNKFKKVVLARKTAIDLKHSISPAQLLKASYRENHHSFHFLMALSPSLAFVGSTPERLYRRVGQELETEALAGTIGRGSNAAQDMELANWLTQDKKNINENQYVVDDILQSLMPHSEQVHLESELRLVRLRKVQHLKKNIMAQLKKGVNGVQLLQALQPTAAVAGLPRAEALEYIQANEPFARGWYAGSVGYLSHDRAEFCVAIRSALLLKDELQLFAGAGIVPGSIAEHEWQELDKKMSTLLSLIAEQPSFGVAS

SEQ ID NO: 95106 - protein, 406 aa, Vibrio harveyi
  REGION 1..406: note = tr|A0A3A1Q7F4|A0A3A1Q7F4_VIBHA Isochorismate synthase OS=Vibrio harveyi OX=669 GN=DS957_004285 PE=4 SV=1
MIMLRNSMGSSTMLTEFLNAHTDDASFFFSSPTVTLLTQGIAAEFSQQVKFSELDTHISKLLESAKEEGNDNPIAVGVIPFSEHNPVHFIVPERLITTSPIRPDKVLDVDGCNDCHPSSIQPIPTPTEYMHSVELATHRCSQENIALDKVVLSRTMQVDTQDEIDRARFLKTLLKQNPGGYTFSTRIGGGHSDAYLMGSSPELLVSRKGPHVCSNPLAGSRRRCENASMNQQQGELMMESSKDLHEHAVVVDAVEKALQPWCHNLYVPMVPSVIETKAMLHLSTRIEGTVSDANTSVLKLASALHPTPAVCGYPTAQAYDFISQVEPFDRGYFTGLVGWVDARGNGEWVVVIRCAEVEKKRIRVYAGAGIVSGSEPQSELEETGNKMRTVLNALGIEIRENMEVVQ

SEQ ID NO: 95107 - protein, 446 aa, Vibrio hepatarius
  REGION 1..446: note = tr|A0A0M0I320|A0A0M0I320_9VIBR Isochorismate synthase MenF OS=Vibrio hepatarius OX=171383 GN=menF PE=3; SV = 1
MNNNPHAYEADLSYFHQAVTKLIERVKNAGDGEHRLVQILEEKPDFTFIDWLESQPLFPKFYWQSRDTREEVVALGQLHTFVDPAPAYTILSGEQRIWGGRSFDGHTDKNRRCMSSLFFLPQIELIRFDDQLSLAVNLSAEKHRTLAALYKLQFDVSTLSPVSAHVQHIEHTPCKQQWGELVEKVLTGIENDEFKKVVLARKTSVILDESLCASQFLKASYLQNHHSFHFMLSLDKGHSFIGSTPERLYARQGQELYTEALAGTIGRGKNASHDMELANWLANDAKNLNENQYVVDDIVERLTPHSDDVCVEEEARLVRLRKVQHLKRSIHANLKQGVNGVQLLSALQPTAAVAGLPRKESMAFIQKHEPFARGWYAGSMGFISHQRAEFCVAIRSALVLGDEVQLFAGAGIVPGSVAEHEWQELDKKMSTLLSLISDHAPLGVAS

SEQ ID NO: 95108 - protein, 435 aa, Vibrio ichthyoenteri
  REGION 1..435: note = tr|F9S2M2|F9S2M2_9VIBR Isochorismate synthase MenF; OS = Vibrio ichthyoenteri ATCC 700023 OX=870968 GN=menF PE=3; SV = 1
MSYFQQAITELIERVKDAADGVTRLVQVLPTKPDFAFIDWLQAQSMFPKFYWQSRDTREEVVALGQLSTFNDPAPAYAFIQGEQRIWGGRSFDGQSAKNPRCPASFFFLPQIELSRQEQQWSIAVNISESKQQVIDSLQQLNMDIPKLLPVSAHIEHIEHTPTLPQWESLVEKVLDGISENQFKKVVLARQTTLALDSAICAAQLLKSSAQHNQHSFHFMLAQNEQHSFIGSTPERLYCRQGKDLYTEALAGTIGRGNNASHDMELANWLSQDSKNLNENQYVVDDIIDRLKPYSDLVEVESEARLVRLRKVQHLKRSIHAHLNHGVNGVQLLSALQPTAAVAGLPRKESMDFIQQHEPFARSWYAGSMGFISQHRAEFCVAIRSAQIVDDVIQLYAGAGIVPGSIAEHEWQELDKKMSTLLSLISDHPPLGVAS

SEQ ID NO: 95109 - protein, 434 aa, Vibrio inusitatus
  REGION 1..434: note = tr|A0A4Y3HWX0|A0A4Y3HWX0_9VIBR Isochorismate synthase MenF OS=Vibrio inusitatus NBRC 102082 OX=1219070; GN = menF PE=3 SV=1
MSHLANAIKQLAQQIESAPSDACRVEVAIEELCADSVLPWMGNQSLFPKFYWQSRDTTEEVVALGQARTFNEINPAYSVLNRGQRIWGGYAFPYKEIKGRCLNSFFFLPHIELVRRKQDWFLAANLMEDRDAVRRAVYRLNSDVMQLSEQLPTVRDVLHTPNKDLWNDNVELALDAIHNGELKKVVLARQSTIKLNSTLQGIELLALSRQQNRHSFHFLFQLEEGHSFIGSTPERLYSRRGQLIETEALAGTIGRHSNPAQDLQLANWLINDKKNLQENQYVVDDIVESLAPFCSNIEVEGEARLVRLRRVQHLKRHIQAELTKHADRGRLLQALQPTAAVAGLPRRLALEFIERHEPFSRAWYSGSVGYISEQSAEFCVAIRSALVQEDNLHLFAGAGIVPGSQAEHEWQELDKKMSTLLSLITEQSVLEQAS

SEQ ID NO: 95110 - protein, 48 aa, unidentified
  source 1..48: note = Vibrio ishigakensis
  REGION 1..48: note = tr|A0A0B8NY49|A0A0B8NY49_9VIBR Menaquinone-specific isochorismate synthase OS=Vibrio ishigakensis OX=1481914; GN = JCM19231_2817 PE=4 SV=1
MQGKRLSLFAGAGIVPGSHAEHEWQELDKKMSTLLSLITEQSILEQAS

SEQ ID NO: 95111 - protein, 435 aa, unidentified
  source 1..435: note = Vibrio jasicida
  REGION 1..435: note = tr|A0A2S7UQZ6|A0A2S7UQZ6_9VIBR Isochorismate synthase MenF OS=Vibrio jasicida OX=766224 GN=menF PE=3; SV = 1
MSQFHQAVNRIIERVQQTEGNQTRLIEPLSEKPNFAFIDWLEAQPLFPKFYWQSRDTREEVVALGQLHSFVEPGPAYTILGEGQRVWGGRSFDGQHEKNRRCMPSFFFLPQIELIRFDQQWSLAVNIAEDKTRTLAGLKKLVSDVPSLAPISSHIRSIDHAPTAPQWNDLVEKVLTGIDNDEFKKVVLARKSTVHLDSTLSAAQLLKASYLNNHHSFHFLLSLDSKHSFMGSTPERLYSRIGHELHTEALAGTIGRGENATQDMELANWLSQDSKNLNENQYVVDDIIERLSPHSESVEVETDPRLVRLRKVQHLKRNIHADLKTGINGVQLLSALQPTAAVAGLPRKESMQFILDNEPFARGWYAGSMGYISHERAEFCVAIRSALILEEQVQLFAGAGIVPGSIAEHEWAELDKKMSTLLSLISDHPPLGVAS

SEQ ID NO: 95112 - protein, 440 aa, Vibrio kanaloae
  REGION 1..440: note = tr|A0A1E5DSI4|A0A1E5DSI4_9VIBR Isochorismate synthase MenF OS=Vibrio kanaloae 5S-149 OX=1191299 GN=menF; PE = 3 SV=1
MDEVDLSHFQQTLSALIERVHNAPASEVRCVEVLTQKPSFAFIEWLHAQPLFPKFYWQSRDTREEVVALGQLHTFSDPAPAYAILGEDQRIWGGRSFDGHTAKNRRCMESFFFLPQVELIRFDNTWSLAVNLSPDRVASINALNKLSVEAAILAPLSAHIEQITHVPEKEQWGSLVNKVLQGISDEEYKKVVLARKTTLQLDAPICAAQLLKASYQQNHHSFHFMLVLDSKHSFIGSTPERLYSRHGIELDTEALAGTIGRGENATEDMELANWLSQDSKNLNENQYVVDDIIERLTPHSQMVHVEKDARLVRLRKVQHLKRNIHAQLNAGINGVQLLAALQPTAAVAGLPRKEAMDFILEHEPFARGWYAGSVGYISHQRAELCVAIRSALVVNDQVQLFAGAGIVPGSVAEHEWQELNKKMSTLLSLISDHPPLGVAS

SEQ ID NO: 95113 - protein, 435 aa, Vibrio lentus
  REGION 1..435: note = tr|A0A2N7GXI3|A0A2N7GXI3_9VIBR Isochorismate synthase MenF OS=Vibrio lentus OX=136468 GN=menF PE=3 SV=1
MSHFQQTISALIERVQNAQASEVRCVEVLTQKPSFAFIEWLHAQPLFPKFYWQSRDTREEVVALGQLHTFSDPAPAYAILGEDQRIWGGRSFDGHTAKNRRCMESFFFLPQVELIRFDDTWSLAVNLSPDRVASINALNKLSVEAAILAPLSAHIEQINHVPEREQWGNLVDKVLQGISDEEYKKVVLARRTTLQLDAPICAAQLLKASYLQNHHSFHFMLVLDSKHSFIGSTPERLYSRYGTELNTEALAGTIGRGENATEDMELANWLSQDSKNLNENQYVVDDIIERLAPHSQTVHVEKEARLVRLRKVQHLKRNIHAQLNNGVNGVQLLAALQPTAAVAGLPRKEAMDFILEHEPFARGWYAGSVGYISHQRAEFCVAIRSALIVNDQVQLFAGAGIVPGSVAEHEWQELNKKMSTLLSLISDHPPLGVAS

SEQ ID NO: 95114 - protein, 391 aa, Vibrio mangrovi
  REGION 1..391: note = tr|A0A1Y6IXR5|A0A1Y6IXR5_9VIBR Isochorismate synthase EntC OS=Vibrio mangrovi OX=474394 GN=entC PE=4; SV = 1
MTQLIAQPDIIDQFNPADDFVFLSDHQSLIARGNLFRISTPVSDGCDPTGHFQTELKRAFTHAQSAGIKHPIIVGAIPFDTRLPSALYVPQQVDWLSRQQIRIKPSSSPLSGQATQYPDKNTFEQMVRDALTAMQTRQADKIVLSRLIHVDCHTTPDRQSLFASLNEQNPSGYNFHVPLPDGDSLIGASPELLVRKHGSEFTSMPLAGSAKRAADSLADEQIGRQLMSSEKNRHEHQLVIDDIRRCLAPLSHDLDIPSTPVLSQTPILWHLATRIHGIAPPESNALTLASALHPTPALCGVPQENARQLIEAIEPFERQLFGGIVGWADEEGNGEWVIAIRCGRVSQQQISLFAGAGIVPDSDPEQEWYETGTKLSTMLNVLGLTGEGAKQ

SEQ ID NO: 95115 - protein, 47 aa, Vibrio maritimus
  REGION 1..47: note = tr|A0A090SKM8|A0A090SKM8_9VIBR Menaquinone-specific isochorismate synthase OS=Vibrio maritimus OX=990268; GN = JCM19235_4162 PE=4 SV=1
MKDEVQLFAGAGIVPGSVATHEWQELDKKMSTLLSLISDNPSLGVAS

SEQ ID NO: 95116 - protein, 435 aa, Vibrio mediterranei
  REGION 1..435: note = tr|A0A3G4VFW5|A0A3G4VFW5_9VIBR Isochorismate synthase MenF OS=Vibrio mediterranei OX=689 GN=menF PE=3; SV = 1
MSHLTKAITQLVEKLERAPQGTKRLEQELQGSPKTHGIDWLDAQPHYPKFYWQSRDTREEVVALGQLHTFSEAAPAYTILSENQRVWGGRSFDGHSDKNRRCMSAFFFLPQVELIRFDEGWRLAVNIGMSKEVSIRALKQLVADAKELAPLASDIVSLRHTPEKTQWCDLVDDVLAGIQQDRFKKVVLARKTCVDLKHSISPAQLLKASYAQNHHSFHFLMALSPGHAFVGSTPERLYRRVGQELETEALAGTIGRGGNAAQDMELANWLTQDDKNINENQYVVDDILQSLSPHSDQVHLESELRLVRLRKVQHLKRNILAHLHKGINGVQLLQALQPTAAVAGLPRAEAMQYIQQNEPFARGWYAGSVGYLSHEKAEFCVAIRSALLVKDELQLFAGAGIVPGSIAEHEWQELDKKMSTLLSLISDQPSLGVAS

SEQ ID NO: 95117 - protein, 435 aa, unidentified
  source 1..435: note = Vibrio metoecus
  REGION 1..435: note = tr|A0A0Q0Q255|A0A0Q0Q255_9VIBR Isochorismate synthase MenF OS=Vibrio metoecus OX=1481663 GN=menF PE=3; SV = 1
MLHFFQAVAQLMEQIRGAKDHDVRFTQPLAEKPPFALIDWLDAQPIFPKFYWQSRDTREEVVALGQIYTFTDPAPAYAILGDEQRVWGGRSFDGNTEKNPRCMSSFFFLPQIELTRFDEQWSLAVNINSEPQRTLNALQKLLLEVPALRPLTAQVSDVGHTPSLLQWNALVEKVLNGITQQQFKKVVLARKTKLSLDAPISAAQLLQASHAQNHHSFHFLLALDSRHSFMGSTPERLYLRHGQNLETEALAGTIGRGANAAQDMELANWLTHDSKNLNENQLVVDDIIESLAPYADHIHSQHDAQLVRLRKVQHLKKRIDVELKSGVNGVQLLSALQPTAAVAGLPRQSALAFIAEHEPFARGWYAGSMGYFSHAQAEFCVAIRSALVVDKQVQLFAGAGIVPGSVAEHEWQELDKKLSTLLSLITDRLPLGVAS

SEQ ID NO: 95118 - protein, 436 aa, Vibrio metschnikovii
  REGION 1..436: note = tr|C9P5K4|C9P5K4_VIBME Isochorismate synthase MenF; OS = Vibrio metschnikovii CIP 69.14 OX=675813 GN=menF PE=3; SV = 1
MSHFHQAIARLIEQIKNAKDNDVRFVQTLIGPPPFALIDWLEAQPLFPKFYWQSRDGREEVVAVGQLYTFTEPAPAYAILGDNQRVWGGRSFDGQTDKNRRCMSSFFFLPQVEIIRFDQSWSVAANFIAQDRQRTLATLEKLHREVAPLSRLHSQVLQVEHLPKQSHWSELVSRALTSIEQQQFKKVVLARQTRLTLDNPISAAQLLKASIADNQRSFHFLLALDSKHSFIGSTPERLYYRQGQELQTEALAGTIGRGDTAEQDQQLADWLIHDGKNLNENQYVVDDIIERLTPLAEQVEVESHAQLLTLRQVQHLKRDIVAQLKPSINGVQLLSALQPTAAVAGLPRQPALDFITEHEPFARGWYAGSMGYFSHQQAQFCVAIRSALVVENCVQLYAGAGIVPGSIAEHEWQELDKKMSTLLSLITNQPPLGTAL

SEQ ID NO: 95119 - protein, 994 aa, Vibrio mimicus
  REGION 1..994: note = tr|D2YGK3|D2YGK3_VIBMI Multifunctional fusion protein OS=Vibrio mimicus VM603 OX=671074 GN=menD PE=3 SV=1
MEQIRGAKDHDVRFTQPLADKPPFALIDWLDAQPIFPKFYWQSRDTREEVVALGQVYTFTDPAPAYAILGDDQRVWGGRSFDGHTPKNPRCMSSFFFLPQIELTRFDNHWSLSVNLNNEPQRTLSALQKLLLEVPTLRSMTAEVNTVEHTPTLPQWNDLVEKVLSGITQQQFKKVVLARKTKLSLDAPISAAQLLKASHAQNHHSFHFLLALDSRHSFMGSTPERLYLRHGQTLETEALAGTIGRGMNAAQDMELANWLAHDSKNLNENQLVVEDIIESLTPYAEQIHSQSEAQLVRLRKVQHLKKRIDAGLKSGINGVQLLSVLQPTAAVAGLPRQSALAFIAENEPFARGWYAGSMGYFSHAQAEFCVAIRSALVVDKEVQLFAGAGIVPGSIAEHEWQELDKKALYFTELDYRPFTAGSGLMNHDQALLNRLWSRVLLEELSRLGVTQVCVAPGSRSTPLTLEAHANAAFTLHTHYDERGLGFMALGLAKASQQPVAVIVTSGTAVANLLPAIAESKLTGERLVVLTADRPPELVGCGANQAIVQSGIFSHHVNATLDLPSPAIHHPLTWLLTSIDNVMTRQALLGGSVHINCPFPEPLYSAGDEAIYQPYLASVQRWREHQRPFTERHQSLAQSVPSSLDGFLVKGVVIVGSLTSDEAQAAQRFAQAMGWPLLCDPQSGISSEWAHFDLWLQHQPARDVLNQCEVVVQFGSRIVSKRLAQWLANWCGQARGEYHYVSPQTERNNPWHAMQQQWVCDIPNWVEALLSKRLAGQNTQQGWADELTRYAQSVRQLAQLHFSSSALSEVALALDLTERAMQADLFLGNSLIVRLVDMFSALDGREVFSNRGASGIDGLVATASGVQRARQKPLFMLMGDTSLLYDLNSLALMRNPPQPTVIVVTNNDGGAIFDLLPVPSEQREALYQMPHGMDFAHAAQQFGLAYCSAQTLEHYQTLVEEHFAQGVGTLLIEVKTPPQQASMHIKQLTSQLHAL

SEQ ID NO: 95120 - protein, 435 aa, Vibrio mytili
  REGION 1..435: note = tr|A0A0C3DL68|A0A0C3DL68_9VIBR Isochorismate synthase MenF OS=Vibrio mytili OX=50718 GN=menF PE=3 SV=1
MSEFHQAVTKIIERVQQTQGNPIRLVEPLREKPNFSLIDWLDAQPLFPKFYWQSRDTREEVVALGQLHTFVEPSPAYAILGEGQRIWGGRSFDGQHEKNRRCMRSFFFLPQIELIRFDQQWSLAVNVSSDKARTLAGLKKLLGDVMSVAPISVHIRSVVHSPSQPQWTQLVDKVLKGIENNAFKKVVLARRSTLQLDTELSAAQLLKASSQSNHHSFHFLMSLDSKHSFMGSTPERLYSRVGCELETEALAGTIGRGENAIQDMELANWLSKDAKNLNENQYVVDDIIERLSPHSEVVDVEKEPRLVRLRKVQHLKRSIHASLKADINGVQLLSALQPTAAVAGLPREASMQFILDNEPFARGWYAGSMGYISHERAEFCVAIRSALVQGEQVHLFAGAGIVPGSVAEHEWAELDKKMSTLSTLISDHPPIGVAS

SEQ ID NO: 95121 - protein, 435 aa, Vibrio natriegens
  REGION 1..435: note = tr|A0A1B1EBH9|A0A1B1EBH9_VIBNA Isochorismate synthase MenF OS=Vibrio natriegens OX=691 GN=menF PE=3 SV=1
MSQFHQAVQRIIKRVQKIQGNPMRLVEPLGEKPHFSLIDWLDAQPLFPKFYWQSRDTREEVVALGQLHSFVDPGSAYTILGEGQRVWGGRSFDGQHEKNRRCMTSFFFLPQIELIRFDEQWSLAVNVAEDTSRTLAGLHKLACDVAALTPISTHIRLIEHTPTQPEWGDLVDKVLNGIENDDFKKVVLARRSTLHLDRELSAAQLLKASASQNHHSFHFLFSLDRKHSFMGSTPERLYARVGHELHTEALAGTIGRGDNATHDMELANWLSQDLKNLKENQYVVDDIVERLSPHSESVEVETEPRLVRLRKVQHLKRNIHASLKAGINGVQLLSALQPTAAVAGLPRQESMQFILENEPFARGWYAGSMGYISHERAEFCVAIRSALVLGDQVQLFAGAGIVPGSVAEHEWAELDKKMSTLLTLISEHPPLGVAS

SEQ ID NO: 95122 - protein, 435 aa, Vibrio navarrensis
  REGION 1..435: note = tr|A0A099LRP1|A0A099LRP1_9VIBR Isochorismate synthase MenF OS=Vibrio navarrensis OX=29495 GN=menF PE=3; SV = 1
MSYFHQAIGQLIERVKNAGEDESRLIEPIDTALKFTLIDWLEAQPIFPKFYWHSRDGREQVVALGQLHTFTEPAPAYAILAPGQRVWGGRSFDGLSEKNRRCMSSFFFLPQIELLQQDGKLSLAVNLGAERSRLLASLRKLVCDVPLLAPLAAHIGHIDHLPSQDQWQSLVDKVLHGIEQNAFKKVVLARKTSVQLDTPLCASQLLKASAQHNHHSFHFMLSLDRKHSFIGSTPERLYLRHDRELHTEALAGTIGRGVNATHDLELANWLAQDAKNLNENQYVVDDIVERLTPHAETVQVEAEPRLVRLRKVQHLKRDIHAHLKEGINGVQLLSALQPTAAVAGLPRQASMQFILDNEPFSRGWYAGSVGYLSHDKAEFCVAIRSALLVDDELQLFAGAGIVPGSIAKHEWAELDKKMSTLLSLIAEYPPLGVAS

SEQ ID NO: 95123 - protein, 435 aa, unidentified
  source 1..435: note = Vibrio neocaledonicus
  REGION 1..435: note = tr|A0A4P8FY07|A0A4P8FY07_9VIBR Isochorismate synthase MenF OS=Vibrio neocaledonicus OX=1208308 GN=menF; PE = 3 SV=1
MSQFHQAVKRIIERVQQSEGNQTRLVEPLSEKPNFSFIDWLDAQPLFPKFYWQSRDTREEVVALGQLHAFVEPGPAYTILGEGQRVWGGRSFDGQHEKNRRCMPSFFFLPQIELIRFDQQWSLAVNISEDKARTLAGLNKLVCEVAALAPISSHIRSIVHTPSQPQWNELVHKVLTGIENDDFKKVVLARRSTVQLDNTLSAAQLLKASYLNNHHSFHFMLSLDSKHSFMGSTPERLYSRVGHELHTEALAGTIGRGDNATQDMELANWLSQDQKNLNENQYVVDDIIDRLSPHSEMVEVEAEPSLVRLRKVQHLKRNIHASLRAGINGVQLLSALQPTAAVAGLPRQESMQFILDNEPFARGWYAGSMGYISHERAEFCVAIRSALVLGDQVQLFAGAGIVPGSVAEHEWAELDKKMSTLLTLISDHPPLGVAS

SEQ ID NO: 95124 - protein, 446 aa, Vibrio neptunius
  REGION 1..446: note = tr|A0A0F4P5N7|A0A0F4P5N7_9VIBR Isochorismate synthase MenF OS=Vibrio neptunius OX=170651 GN=menF PE=3; SV = 1
MNKNPQAYEADLSHFHQAVTELIERVKDAEDGVNRLVQVLEEKPDFAFIDWLESQPLFPKFYWQSRDTREEVVALGQLHTFVDPAPAYTILADEQRIWGGRSFDGQTEKNRRCMSSFFFLPQIELIRFDNRWSLAVNLTADKHRTLAGLSKLKIEVGALRPVSAQIKSISHIPEKPQWSELVEKVLTGIENNDFKKVVLARRTSIHMDSTVSAAQLLKSSYLQNHHSFHFMLSLDKKHSFIGSTPERLYARQGQELYTEALAGTIGRGDNASHDMELANWLSQDSKNLNENQYVVDDIIDRLTPHSEHVEVEQEARLVRLRKVQHLKRSIHAHLKSGINGVQLLAALQPTAAVAGLPRKASMDFIQNNEPFARGWYAGSMGFISHQRAEFCVAIRSALILGEEVQLFAGAGIVPGSVADNEWQELDKKMSTLLSLIADIPPLGVAS

SEQ ID NO: 95125 - protein, 446 aa, Vibrio nereis
  REGION 1..446: note = tr|A0A0M0HNP0|A0A0M0HNP0_VIBNE Isochorismate synthase MenF OS=Vibrio nereis OX=693 GN=menF PE=3 SV=1
MNNNPHAYEADLSYFHQAVSELIERVKVVEDGVTRLVQILEEKPDFAFIDWLEAQPLFPKFYWQSRDTREEVVALGQLHTFVDPAPAYAILSGDQRVWGGRSFDGHTDKNRRCMSSLFFLPQIELIRFDDQFSLAVNLTAEKHRTLSALYKLQYEVSALSPVSAQVEHIEHTPSKAHWGELVEKVLTGIDNNEFKKVVLARKTSVMLDESLCASQFLKASYLQNHHSFHFMLSLDKKHSFIGSTPERLYARQGQELYTEALAGTIGRGANASQDMELANWLANDSKNLNENQYVVDDIIERLTPHSETVCVEEEARLVRLRKVQHLKRSIHAHLKKGVNGVQLLSALQPTAAVAGLPRKESMAFIQQHEPFARGWYAGSMGFISHQRAEFCVAIRSALVLGEEVQLFAGAGIVPGSVAEHEWQELDKKMSTLLSLISDHAPLGVAS

SEQ ID NO: 95126 - protein, 393 aa, Vibrio nigripulchritudo
  REGION 1..393: note = tr|U4KC41|U4KC41_9VIBR Vibriobactin-specific isochorismate synthase OS=Vibrio nigripulchritudo OX=28173; GN = vibC PE=4 SV=1
MKREVIGYSKMESELLDSELLSSPFFFASPNNTMMGSGVENEFHEPIEFSKLAEKANEMLQAAKKSESDNPVLFGVVPFNEENPTKFIVPEKLYVSSSTRALRPNSQSSSDARVISSPSGHHYKQGVSDLLDMFANTELSKVVLSRAIEVATDTDIQQQALLRNLLSINSKGYTFAANISDEQKLMGASPELLVAKKGSHLISNPLAGSRPRSDSDEQNQSSVDSLLNTNKDLHEHGLVVEEVERVMSQYCYNLYTPMIPSVIETKTMLHLSTVLEGQVNDPAINVLKVAAELHPTPAVCGYPREKAYDAIRKLEQFDRGYFTGMVGWCDSRGNGEWVVTIRCAEVQKRQMKVFAGAGIVDESQPQSELDETGAKMNTILTAAGIQLKDMLTA

SEQ ID NO: 95127 - protein, 446 aa, Vibrio orientalis
  REGION 1..446: note = tr|C9QIL5|C9QIL5_VIBOR Isochorismate synthase MenF; OS = Vibrio orientalis CIP 102891 = ATCC 33934 OX=675816; GN = menF PE=3 SV=1
MNNNFDAYEADLSYFHQAVTELIERVKDAEDGTTRLVQVLEEKPDFPFIDWLDAQPLFPKFYWQSRDTREEVVALGQLHTFVDPAPAYAILADDQRIWGGRSFDGHTGKNRRCMSSFFFLPQVELIRFDDKWSLAVNLNAEKHRTLAGLYKLQLDVAPLPPISSHIESIQHVPEKEQWSELVEKVLAGIENDDFKKVVLARKTTVSLDQPLCASRLLKSSYLSNHHSFHFLLSLDKDHSFIGSTPERLYLRQGQELYTEALAGTIGRGSNASQDMELANWLAGDSKNLNENQYVVDDIIERLSPYSDDVVVEQEARLVRLRKVQHLKRSIHAHLHKGTNGVQLLGALQPTAAVAGLPRQESMDFIQQHEPFARGWYAGSMGFISHQRAEFCVAIRSALVLDGEVQLFAGAGIVPGSVAEYEWQELDKKMSTLLSLISDHPPLGVAS

SEQ ID NO: 95128 - protein, 435 aa, Vibrio owensii
  REGION 1..435: note = tr|A0A0C1WAZ7|A0A0C1WAZ7_9VIBR Isochorismate synthase MenF OS=Vibrio owensii CAIM 1854 = LMG 25443; OX = 1229493 GN=menF PE=3 SV=1
MSQFHQAVKRIIERVQQTEGNQTRLVEPLSEKPNFAFIDWLEAQPLFPKFYWQSRDTREEVVALGQLHSFVEPGPAYTILGEGQRVWGGRSFDGQHEKNRRCMPSFFFLPQIELIRFDQQWSLAVNISEDKTRTLAGLKKLVCDVPMLAPISSHIRSIDHAPTEPQWNDLVEKVLTGIENDDFKKVVLARKSTVRLDSTLSAAQLLKASYLNNHHSFHFLLSLDSKHSFMGSTPERLYSRVGNELHTEALAGTIGRGDNATQDMELANWLSQDSKNLNENQYVVDDIVDRLSPHSESVEVEKEPRLVRLRKVQHLKRNIHADLKAGINGVQLLSALQPTAAVAGLPRKESMQFILDNEPFARGWYAGSMGYISHERAEFCVAIRSALILGDQVQLFAGAGIVPGSIAEHEWAELDKKMSTLLSLISDHPPLGVAS

SEQ ID NO: 95129 - protein, 394 aa, unidentified
  source 1..394: note = Vibrio palustris
  REGION 1..394: note = tr|A0A1R4B874|A0A1R4B874_9VIBR Isochorismate synthase DhbC OS=Vibrio palustris OX=1918946 GN=dhbC PE=4; SV = 1
MKREVIGYNELSNVVLKQNLDSAPFFFASPSATMLGVGIEDTFTGVIPFAQLAEKATSMLQKAKKNEQDNPVLFGIVPFSEDNPSRFLIPDHLHVSSSTRAEQHAQPAYHAPGKLVSAPTGEHYKQAVQDAIGLFSNTDLSKVVLSRALEVGTDEDIDQLRLLKNMLAINSAGYTFAASLASGNKMMGASPELLVAKKGSNITSNPLAGSLPCSDDVAVNAMRSEQLLNSAKDLYEHSFVVEEVERVLNKYCHGLYTPMAPSVIKTKTMLHLSTLLEGQVDNPDISVLQLASDLHPTPAVCGYPRQAAYQAIRNIEQYDRGYFTGMVGWCDSRGNGEWVVTIRCAEVQKRSMKVFAGAGIVSQSQPQSELDETGAKMSTILSAAGIELNDMLVA

SEQ ID NO: 95130 - protein, 436 aa, unidentified
  source 1..436: note = Vibrio panuliri
  REGION 1..436: note = tr|A0A1Q9HJE7|A0A1Q9HJE7_9VIBR Isochorismate synthase MenF OS=Vibrio panuliri OX=1381081 GN=menF PE=3; SV = 1
MSYFQQAITELIERVKDAKDEATRLVQVLEYKPDFAFIDWLQAQPLFPKFYWQSRDTREEVVALGQLKTFKEPAPAYAYLSGSQRIWGGRSFDGQSAKNPHCPASFFFLPQVELVREEHTWSLVANIVAGSKSCVIKSLQQLRCEVPRLLPLSAHIDHIEHTPTQPEWNRLVEKVLQGIDADEYKKVVLARRTTLGLHSPICAAQLLKSSSEHNQHSFHFMLAQNDRHSFIGSTPERLYYREGKDLYTEALAGTIGRGDNATHDMALANWLTQDSKNLNENQYVVDDIIDRLTPYSDLVEVEPEARLVRLRKVQHLKRSIHAHLNDGVNGVQLLGALQPTAAVAGLPRRESMDFIQQHEPFERSWYAGSMGFISLQRAEFCVAIRSAQVVDDEISLYAGAGIVPGSVAEHEWQELDKKMATLLSLISDQPPLGVAS

SEQ ID NO: 95131 - protein, 435 aa, Vibrio parahaemolyticus
  REGION 1..435: note = tr|A0A4S3T8F2|A0A4S3T8F2_VIBPH Isochorismate synthase MenF OS=Vibrio parahaemolyticus OX=670 GN=menF; PE = 3 SV=1
MSEFHQAVKRIIERVQHTEGNQVRLVEPLSEKPNFAFIDWLDAQPLFPKFYWQSRDTREEVVALGQLHSFVEPGPAYTILGEGQRVWGGRSFDGQHEKNRRCMPSFFFLPQIELIRFDQQWSLAVNLTEDKARTLAGLRKLICDVAALPPISSHIRSIVHTPIKSEWDALVHKVLTGIENDEFKKVVLARRSTVQLDNTLSAAQLLKASYLNNHHSFHFLLSLDSKHSFMGSTPERLYSRVGHELHTEALAGTIGRGDNATHDMELANWLSQDSKNLNENQYVVDDIVERLSPHSEMVEVETEPRLVRLRKVQHLKRNIHASLKTGTNGVQLLSALQPTAAVAGLPRKESMQFILDNEPFARGWYAGSMGYISHERAEFCVAIRSALVLGDQVQLFAGAGIVPGSVAEHEWAELDKKMSTLLTLISDHPPLGVAS

SEQ ID NO: 95132 - protein, 393 aa, Vibrio pectenicida
  REGION 1..393: note = tr|A0A3R9EDU7|A0A3R9EDU7_9VIBR Isochorismate synthase OS=Vibrio pectenicida OX=62763 GN=EJA03_18320; PE = 4 SV=1
MKREVVGFSKMANEMFTNKLLDSPFFFASPNNSMLGVGTKIRLNQSIPFSQLASTAQELLEKAKTKDNDNPLLFATVPFNENTPTQFCIPETLYVSSSTRSQRNYQNLSQTAKVVSPPSGNEYKNGVSRLLNLFDTTELSKVVLSRSIKIATDKKIDQCSLLRNLLSINTNGYTYCSQISEHSKLMGASPELLLSKKGSHVLSNPLAGSRPKSTCEIENQSACISLLDTQKDLNEHSFVVEDVEKVLSRYCHNLYTPMVPSVIETETMLHLSTVLKGEIDNPHTNSLQIAADLHPTPAVCGFPRQSAYAAIKEIERFERGYFTGMVGWCDARGNGEWVVTIRCAEVSQKAMSIYAGAGIVNESSPQSELEETGAKMNTILRAAGIQVDELLTA

SEQ ID NO: 95133 - protein, 393 aa, Vibrio penaeicida
  REGION 1..393: note = tr|A0A3S0VAP8|A0A3S0VAP8_9VIBR Isochorismate synthase OS=Vibrio penaeicida OX=104609 GN=EKN09_07050; PE = 4 SV=1
MKREVIGYSKMECELLDSELLSSPFFFASPDNTMMGKGIEIEFHQSIPFTQLAAQANKMLQAAKKSDSDNPVLFGVVPFNEENPTKFIIPEKLYVSSSTRALRPNSQSPSDARVISSPSGNHYKQGVSDLLDMFANTELSKVVLSRAIEVATDTDIQQQALLRNLLSINSKGYTFAANISKDQKLMGASPELLVAKKGSHLISNPLAGSRPRSESQELNKASVDSLLNTNKDLYEHGLVVEEVERIMSKYCYNLYTPLIPSVIETKTMLHLSTVLEGQVNDPAINVLKVAAELHPTPAVCGYPREKAYDAIRKLEQFDRGYFTGMVGWCDSRGNGEWVVTIRCAEVQKRQMKVFAGAGIVDESQPQSELDETGAKMNTILTAAGIQLKDMLTA

SEQ ID NO: 95134 - protein, 436 aa, Vibrio ponticus
  REGION 1..436: note = tr|A0A3N3DY67|A0A3N3DY67_9VIBR Isochorismate synthase MenF OS=Vibrio ponticus OX=265668 GN=menF PE=3; SV = 1
MSYFQQAITELIERVKDAKDEVTRLVQVLEYKPDFAFIDWLQAQPLFPKFYWQSRDTREEAVALGQLRTFDDPAPAYAYLSGAQKIWGGRSFDGQSAKNPDCPASFFFLPQIELVREEQTWSLVVNLVEGAKPRVLKSLQQLRCEVPKLLPLSAHINHIEHTPTEPEWHALVEKVLAGIEADEFKKVVLARRTTLELHTPICASQLLKSSSEHNQHSFHFMLAQNERHSFIGSTPERLYFRQGKDLYTEALAGTIGRGDNASHDMALANWLTQDSKNLNENQYVVDDIIDRLKPYSDLVEVEPEARLVRLRKVQHLKRSIHAHLNEGVNGVQLLGALQPTAAVAGLPRRESMQFIQQYEPFERSWYAGSMGFISLERAEFCVAIRSAQVVDDEISLYAGAGIVPGSIAEHEWQELDKKMATLLSLISDHPPLGVAS

SEQ ID NO: 95135 - protein, 435 aa, Vibrio proteolyticus
  REGION 1..435: note = tr|U3B8V9|U3B8V9_VIBPR Isochorismate synthase MenF; OS = Vibrio proteolyticus NBRC 13287 OX=1219065 GN=menF PE=3; SV = 1
MSHFHQALTELIERVKDAKDGQNRLVQVLQEKPNFAFIDWLDAQPIFPKFFWHSRDTREEVVALGQLHTFSDPAPAYSILGQDQRVWGGRSFDGQTPKNRRCMSSFFFLPQIELIRFDEQWSLAVNLSHEPHRTLASLRKLQLDVAPLPPISTHIDSITHTPDQSGWTTLVEKVLQGIEEDAFKKVVLARQTCVALDTPIHAAQLLKASQAENHHSFHFMLALDAQHCFIGSTPERLYARTGQELQTEALAGTIGRGINAAQDMELANWLTQDAKNLNENQYVVDDIIERLAPHSQDVHVEQEARLVRLRKVQHLKRSIHAHLNPGVNGVQLLAALQPTAAVAGLPRKQAMDFIQQHEPFARGWYAGSMGYISHQQAEFCVAIRSALVLKNHIQLFAGAGIVPGSVAEHEWQELDKKMSTLLSLLSDNPPLGVAS

SEQ ID NO: 95136 - protein, 435 aa, unidentified
  source 1..435: note = Vibrio qinghaiensis
  REGION 1..435: note = tr|A0A223MYK6|A0A223MYK6_9VIBR Isochorismate synthase MenF OS=Vibrio qinghaiensis OX=2025808 GN=menF; PE = 3 SV=1
MSHFHQAIARLIEQINDAKDDDVRFVQILQEAPPFAPIDWLEAQPIFPKFYWQSRDTREEVVALGQLYTFSEAEPAYAILGEDQRVWGGRSFDGHTDKNRRCLPSFFFLPQIELIRCDGQWSLAANVTSERQRSLDALCKLQLEINPLRAMTSHIKQVIHQPNEVQWQQLVNQALDRIEHQVFKKVVLARQTTLSLDKPLSAAQLLKASAEHNHHSFHFLFALDQKHSFMGSTPERLYLRQGQTLYTEALAGTIGRGENASQDMELSHWLTQDSKNLNENQYVVDDIIERLTPHSDSSDVEQEVRLIRLRKVQHLKRGIHVRLKKGVNGVQLLSALQPTAAVAGLPRKAAMDFIQANEPFARGWYAGSVGYFSHQQAEFCVAIRSALLVDNQVQLFAGAGIVPGSVAEHEWQELDKKMATLLSLISDHFPLGVAS

SEQ ID NO: 95137 - protein, 393 aa, unidentified
  source 1..393: note = Vibrio quintilis
  REGION 1..393: note = tr|A0A1M7YX96|A0A1M7YX96_9VIBR Isochorismate synthase DhbC OS=Vibrio quintilis OX=1117707 GN=dhbC PE=4; SV = 1
MKRKVIGYDYMDEMIANHSFEECPFFFSSPANTLFGTGVEQSLEQVIPFKELAEKAQQLLNRAKKSEVDNPVLFGLVPFSEGNPTRFIVPQRLYASGTPRALYQSEPAKSKAMLVSSPSGEKYKQGVMDALDRFSSSELSKVVLSRSIEIESEKEIDRSCLLRNLLKVNPCGYTFSASLNGGRSMIGASPELLVAKRGAHVTSNPLAGSRPRAASQAEDEQERQYLLNCTKELHEHQLVVEEVERVLSQHCHNLYTPMVPSVIETNSMLHLSTRLEGHAVNPQISVLQVASELHPTPAVCGFPRQPAYEAICDIEQYDRGYFTGMIGWCDARGNGEWVVTIRCAEVDKRLMKVYAGAGIVTQSRPESELHETGAKMGTILSAAGIELEDMLVA

SEQ ID NO: 95138 - protein, 435 aa, unidentified
  source 1..435: note = Vibrio renipiscarius
  REGION 1..435: note = tr|A0A0C2NML5|A0A0C2NML5_9VIBR Isochorismate synthase MenF OS=Vibrio renipiscarius OX=1461322 GN=menF; PE = 3 SV=1
MSYFQQAITELIERVKEATDEVSRLVQVLPKKPDFAFIDWLQAQPLFPKFYWQSRDRNEEVVAIGQLSTFSDPAPAYAFLQGEQRVWGGRSFDGQSAKNPHCPASFFFLPQIELIRHDQEWELAINIGGDKLQAIESLQQLKLIIPQLLPLSAQIKCVEHTPTQPQWAHLVKKVLDGIENNQFKKVVLARETTLELDSAICAAQLLKASAEHNQHSFHFMLAQNERHSFIGSTPERLYSRQGKDLYTEALAGTIGRGKNASQDMELANWLSQDSKNLNENQYVVDDIIERLKPYSDVVEVESEARLVRLRKVQHLKRSIHAHLNHGVNGVQLLSALQPTAAVAGLPRKESMDFIQQHEPFARSWYAGSMGFISQQRAEFCVAIRSAQIVDDAIQLYAGAGIVPGSIAEHEWQELDKKVSTLLSLISDHPSLGVAS

SEQ ID NO: 95139 - protein, 435 aa, Vibrio rotiferianus
  REGION 1..435: note = tr|A0A510I7E4|A0A510I7E4_9VIBR Isochorismate synthase MenF OS=Vibrio rotiferianus OX=190895 GN=menF; PE = 3 SV=1
MSQFHQAVKRIIERVQQTEGNQTRLVEPLSEKPSFAFIDWLEAQPLFPKFYWQSRDTREEVVALGQLHSFVEPGPAYTILGEGQRVWGGRSFDGQHEKNRRCMPSFFFLPQIELIRFDDQWSLAVNISEDKTRTLAGLQKLVCDVPTLAPISAHIRSIDHAPTEPQWNALVEKVLTGIDNDDFKKVVLARRSKVHLDSMLSAAQLLKASYLNNHHSFHFLLSLDSKHSFMGSTPERLYSRVGHELHTEALAGTIGRGGNATKDMELANWLSQDTKNLNENQYVVDDIIDRLTPHSEVVEVEQEPRLVRLRKVQHLKRNIYAELKAGINGVQLLSALQPTAAVAGLPRKESMQFILDNEPFARGWYAGSMGYISHERAEFCVAIRSALVLGDQVQLFAGAGIVPGSIAEHEWAELDKKMSTLLSLISDHPPLGVAS

SEQ ID NO: 95140 - protein, 434 aa, Vibrio ruber
  REGION 1..434: note = tr|A0A1R4LRR4|A0A1R4LRR4_9VIBR Isochorismate synthase MenF OS=Vibrio ruber DSM 16370 OX=1123498 GN=menF; PE = 3 SV=1
MSYFYQAVNQLIHQIHQADPQVSRCRQALDFPPHFSLPDWLAVQTLFPKFYWQDREDREEVVALGACMTFSDPAPAYQAISASQRIWGGRSFDGGTAKNPYCKEAFFFLPQIELIREGDAWFLCANLTARDETIQALQQLQSDIPVLPPIETEVLCVDHAPSRAQWCQLVEQALSAMTQQQFDKVVLARQSTFELTQSIQAAQLLKESRRCNDQSFHFLLAIDQRHSFVGSTPERLYQRHGEALVTEALAGTIGRSEDARQDQALSDWLIHDEKNMTENQYVVDDIVERLTPLARSVEVGAETQLVKLRRVQHLKRHITAELNPTINGVQLLGALQPTAAVAGLPRQAAKTFIERYEPFPRGWYAGSIGYISHQRAEFCVAIRSALVMDKQVKLFAGAGIVSGSVAEHEWLELNRKMSTLLSLITEISPEEVVS

SEQ ID NO: 95141 - protein, 438 aa, Vibrio rumoiensis
  REGION 1..438: note = tr|A0A1E5E3P3|A0A1E5E3P3_9VIBR Isochorismate synthase MenF OS=Vibrio rumoiensis 1S-45 OX=1188252; GN = menF PE=3 SV=1
MSELNQVIESLIEKIIDGQVSSENRVSEPVNLPADFNATDWLQEQTLYPRFYWQSRDEREEVVALDQIHDFTDPIAAYAILGEQQRVWGGKSFDSEHANNHHQSSYFFLPKIELMRQDDQWTLNANLSSDFQSIIVALKNLKADYQLSAPLLPQASSVHYSPQFDEWKSILDKALSAIEDNQFEKVVLARETMVELKQPIYASQLLKASREKNRNSFHFLISLAPNDSFLGSTPERLYCRNGDMLETEALAGTTGRSDDLAEDKQLADWLLNDDKNLRENQIVVNDIIERLAPYAETIDVQPEAQLIQLRRVQHLKRHIHGNLSLGVKGVQLLTALQPTAAMAGLPREPSLNFIRINEPFTRGWYSGSVGYFSHNHAEFCVAIRSAVMSGNTVKLYAGAGIVLGSEAEYEWQELNRKTATLLNLISDYPIENDRCEDA

SEQ ID NO: 95142 - protein, 437 aa, Vibrio sagamiensis; identical to SEQ ID NO: 95071
  REGION 1..437: note = tr|A0A511QBZ2|A0A511QBZ2_9VIBR Isochorismate synthase MenF OS=Vibrio sagamiensis NBRC 104589 OX=1219064; GN = menF PE=3 SV=1

SEQ ID NO: 95143 - protein, 435 aa, Vibrio scophthalmi
  REGION 1..435: note = tr|F9RPM2|F9RPM2_9VIBR Isochorismate synthase MenF; OS = Vibrio scophthalmi LMG 19158 OX=870967 GN=menF PE=3 SV=1
MSYFQQAITELIERVKDATDEVTRLVQVLPTKPDFAFIDWLQAQPIFPKFYWQSRDTREEVVALGQLSTFNDPAPAYAFLKGEQRIWGGRSFDGQSAKNPRCPASFFFLPKVELCRQDQQWVIAANISGCKQQTIESLLQLRTVIPKLLPVSAHIQHIEHTPTQPQWESLVEKVLTGIADNQFKKVVLARETTLELDSAICAAQLLKASAEHNQHSFHFMLAQNERHSFIGSTPERLYSRQGKDLYTEALAGTIGRGNNASQDMELANWLTQDSKNLNENQYVVDDIIDRLKPYSDLVEVESEARLVRLRKVQHLKRSIHAHLNQGVNGVQLLSALQPTAAVAGLPRKESMDFIQQHEPFARSWYAGSMGFISQQRAEFCVAIRSAQIVDEVIQLYAGAGIVPGSIAEHEWQELDKKMSTLLSLISDHPPLGVAS

SEQ ID NO: 95144 - protein, 459 aa, Vibrio shilonii
  REGION 1..459: note = tr|A6D8E6|A6D8E6_9VIBR Isochorismate synthase MenF; OS = Vibrio shilonii AK1 OX=391591 GN=menF PE=3 SV=1
MIYVVGINRVSRVYKIKSYSFEVDLSHLTKAITQLVEKLERAPQGTKRLEQELQGSPKTHGIDWLDAQPHYPKFYWQSRDTREEVVALGQLHTFSEAAPAYTILSENQRVWGGRSFDGHSDKNRRCMSAFFFLPQVELIRFDEGWRLAVNIGMSKEVSIRALKQLVADAKELAPLASDIVSLRHTPEKAQWCDLVDDVLAGIQQDKFKKVVLARKTCVDLKHSISPAQLLKASYAQNHHSFHFLMALSPGHAFVGSTPERLYRRVGQELETEALAGTIGRGGNAAQDMELANWLTQDDKNINENQYVVDDILQSLSPHSDQVHLESELRLVRLRKVQHLKRNILAHLHKGINGVQLLQALQPTAAVAGLPRAEAMQYIQQNEPFARGWYAGSVGYLSHEKAEFCVAIRSALLVKDELQLFAGAGIVPGSIAEHEWQELDKKMSTLLSLISDQPSLGVAS

SEQ ID NO: 95145 - protein, 435 aa, Vibrio sinaloensis
  REGION 1..435: note = tr|A0A0A5JHA1|A0A0A5JHA1_9VIBR Isochorismate synthase MenF OS=Vibrio sinaloensis OX=379097 GN=menF PE=3; SV = 1
MSYFHQAVTELIERVKDAKDGVTRLVQVLEEKPDFAFIDWLEAQPLFPKFYWQSRDTREEVVALGQLHTFVEPAPAYAILADDQRIWGGRSFDGQTDKNRRCMSSFFFLPQIELIRFDETWSLAANLSADKHRTLASLYKLQHEVTPLLPVSAHIEHIQHTPEKAEWSQLVEKVLTGIENNDFKKVVLARKTAVTLSAPLCASQFLKSSYLHNHHSFHFMLSLDRKHSFIGSTPERLYLRQGQELYTEALAGTIGRGFNASQDMELANWLANDSKNLNENQYVVDDIIERLSPHSERVEVEQEARLVRLRKVQHLKRSIHAHLHKGVNGVQLLSALQPTAAVAGLPRKESMAFIRENEPFARGWYAGSMGFISHQRAEFCVAIRSALVLNDQVQLFAGAGIVPGSVAEYEWQELDKKMSTLLSLISDNPPLGVAS

SEQ ID NO: 95146 - protein, 394 aa, Vibrio sp.
  REGION 1..394: note = tr|A0A3N9TCC4|A0A3N9TCC4_9VIBR Isochorismate synthase OS=Vibrio sp. LJC006 OX=2487322 GN=EES38_19280; PE = 4 SV=1
MKREVIGYIQLSNVVLNQKLESAPFFFSSPSATMLGAGIEDEFTGVIPFSQLAEKATSMLQKAKKNEQDNPILFGIVPFSEENPSRFLIPNQLYVSSSTRAEQKVDSSTSAPGKLVSSPTGERYKQGVLDAIGLFSSTELSKVVLSRAIEVGTDEDIDQLRLLKNMLAINSTGYTFAASLENGNKMMGASPELLVARKGSNVISNPLAGSLPSSDDVAVNSVRSEQLLNSGKDLYEHGFVVEEVERVLNKYCHSLYTPMVPSVIKTKTMLHLSTVLEGQMNNPEISVLQLASELHPTPAVCGYPRQTAYKAIRDIEKYDRGYFTGMVGWCDSRGNGEWVVTIRCAEVQKRSMKVFAGAGIVSQSQPQSELDETGAKMSTILSAAGIELNDILVA

SEQ ID NO: 95147 - protein, 435 aa, unidentified
  source 1..435: note = Vibrio spartinae
  REGION 1..435: note = tr|A0A1N6M6S5|A0A1N6M6S5_9VIBR Isochorismate synthase MenF OS=Vibrio spartinae OX=1918945 GN=menF PE=3; SV = 1
MSYFYQAVNQLIHQIHQASPQVSRCRQELDFPPHFTLPDWLAAQTLFPQFYWQDRDCQEEVVALGACVTFADPAPAYHVITDSQRIWGGRSFDGGTTKNPHCKEAFFFLPQIELIREGHAWFLCANLTQARDTTIEALRQLQHEIPTLPPMATEVLSVDHAPQRPQWCQLVEQALSAMMQQQFDKVVLARQSTFQLTQSIQAAQLLKESRRHNDQSFHFLLAIDPRHSFVGSTPERLYQRHGEALFTEALAGTIGRSDDLQQDQALSDWLLHDDKNMTENQYVVDDIVDRLAPLARSVEVGAETALVKLRRVQHLKRHIAAVLKPTINGVQLLGALQPTAAVAGLPRQAAKTFIERYEPFPRGWYAGSIGYISHQRAEFCVAIRSALVMDKQVKLFAGAGIVSGSVAEHEWLELDRKMSTLLSLITEISPEEVVS

SEQ ID NO: 95148 - protein, 435 aa, Vibrio splendidus
  REGION 1..435: note = tr|A3UT93|A3UT93_VIBS1 Isochorismate synthase MenF; OS = Vibrio splendidus (strain 12B01) OX=314291 GN=menF PE=3; SV = 1
MSHFQQTISALIERVQNAQASEVRCVEVLTQKPSFAFIEWLHAQPLFPKFYWQSRDTREEVVALGQLHTFSDPAPAYAILGEDQRIWGGRSFDGHTAKNRRCMESFFFLPQVELIRFDDTWSLAVNLSPDRVASINALNKLSVEAAILAPLSAHIEQINHVPEREQWGNLVDKVLQGISDEEYKKVVLARKTTLQLDAPICAAQLLKASYLQNHHSFHFMLVLDSKHSFIGSTPERLYSRYGTELDTEALAGTIGRGENATEDMELANWLSQDSKNLNENQYVVDDIIERLTPHSQTVHVEKDTRLVRLRKVQHLKRNIHAQLNNGVNGVQLLAALQPTAAVAGLPRKEAMDFILEHEPFARGWYAGSVGYISHQRAEFCVAIRSALVVNDQVQLFAGAGIVPGSVAEHEWQELNKKMSTLLSLISDHPPLGVAS

SEQ ID NO: 95149 - protein, 434 aa, Vibrio superstes
  REGION 1..434: note = tr|A0A511QT76|A0A511QT76_9VIBR Isochorismate synthase MenF OS=Vibrio superstes NBRC 103154 OX=1219062; GN = menF PE=3 SV=1
MSHLANAIKQLAQQVESAPRDVCRVEVAIEKLCADSVLPWMGNQSLFPKFYWQSRDTTEEVVALGQARTFNEINPAYSVLNQDQRIWGGYAFPYKENKGRCLSSFFFLPHIELVRRKQDWFLAANLMEDRDAVRRAVYRLNGDTMSLSEHMPAVSDVLHTPNKELWNDNVELALETIHNSDLKKVVLARQTTIKLDSALQGIELLALSRKQNRHSFHFLFQLEEGHSFIGSTPERLYSRRGQLIETEALAGTIGRHSNPAQDLQLANWLINDKKNLQENQYVVDDIVESLAPFCSNIEVEGEARLVRLRRVQHLKRHIQAELTKHADRGRLLQALQPTAAVAGLPRRLALEFIERHEPFSRAWYSGSVGYISEQSAEFCVAIRSALVQEDNLHLFAGAGIVPGSQAEHEWQELDKKMSTLLSLITEQSVLEQAS

SEQ ID NO: 95150 - protein, 403 aa, Vibrio tapetis
  REGION 1..403: note = tr|A0A2N8ZM58|A0A2N8ZM58_9VIBR Vibriobactin-specific isochorismate synthase OS=Vibrio tapetis subsp. tapetis; OX = 1671868 GN=vibC PE=4 SV=1
MFRDSVGNKLLLTKLFDDDLDGALFFFSSPTVTMLTEGVAAELTETLKFSELDDQINNLFLKVKSDDNDNPIAVGVIPFSEGNPVHFIVPKRIVTTSPIRPNSIEESECLGVCRPSTVWSNPTAQVYMKSVLEAESCCGNCDSSLDKVVLSRTVEVDTETEIDRISLLKRLLKQNPGGYTFSTKLGSGGEDSYLMGSSPELLVSRKGQYVCSNPLAGSRRRSTDEEINLQNSESMIDSEKDLHEHAVVVDAVERALQPWCSNLYVPLIPSVMATKSMLHLSTKIEGTILDVSTSALKLASHLHPTPAVCGYPTDNAHQFINNTEPFDRGYFTGLVGWVDSRGNGEWVVVIRCAQVEKKRLKVYAGAGIVSGSEPLSELNETGNKMRTVLNALGIDLKEEMETT

SEQ ID NO: 95151 - protein, 440 aa, Vibrio tasmaniensis
  REGION 1..440: note = tr|B7VHY8|B7VHY8_VIBTL Isochorismate synthase MenF; OS = Vibrio tasmaniensis (strain LGP32) OX=575788 GN=menF; PE = 3 SV=1
MNEVDLSHFQQTISALIERVQNAQASEVRCVEVLTQKPSFAFIEWLHAQPLFPKFYWQSRDTREEVVALGQIHTFSDPAPAYAILGEDQRIWGGRSFDGHTAKNRRCMESFFFLPQVELLRFDKTWSLAVNLSPDRVASINALNKLSVEAAILAPLSAHIEQINHVPEREQWGNLVDKVLKGISDEEYKKVVLARKTTLQLDAPICAAQLLKASYLQNHHSFHFMLVLDSKHSFIGSTPERLYSRYGTELDTEALAGTIGRGENATEDMELANWLSQDSKNLNENQYVVDDIIERLTPHSQTVHVEKEARLVRLRKVQHLKRNIHAQLNNGVNGVQLLAALQPTAAVAGLPRKEAMDFILEHEPFARGWYAGSVGYISHQRAEFCVAIRSALIVNDQVQLFAGAGIVPGSVAEHEWQELNKKMSTLLSLISDHPSLGVAS

SEQ ID NO: 95152 - protein, 462 aa, unidentified
  source 1..462: note = Vibrio thalassae
  REGION 1..462: note = tr|A0A240EH23|A0A240EH23_9VIBR Isochorismate synthase MenF OS=Vibrio thalassae OX=1243014 GN=menF PE=3; SV = 1
MCFLIYVVGINRVSRVYKIKSYSFEVDLSHLTKAITQLVEKLERAPQGTKRLEQELLGPPNTHCIDWLDTQPHYPKFYWQSRDTREEVVALGQLHTFSEPAPAYTILSDNQRVWGGRSFDGHSEKNRRCMSAFFFLPQVELIRFDDGWRLAVNIGMSKEVSIRALKQLVADAKELAPLASDIVSLSHTPEKARWCELVEDVLKGIEQDKFKKVVLARKTCVDLKHSISPAQLLKASYIQNHHSFHFLMALSPEHAFVGSTPERLYRRVGLELETEALAGTIGRGGNAAQDMELANWLTQDHKNINENQYVVDDILHSLSPHSEQVHLETELRLVRLRKVQHLKRNILAHLHQGINGVQLLQALQPTAAVAGLPRAEAMQYIQDNEPFARGWYAGSVGYLSHEKAEFCVAIRSALLVKDELQLFAGAGIVPGSIADDEWQELDKKMSTLLSLISDQPSLGVAS

SEQ ID NO: 95153 - protein, 440 aa, unidentified
  source 1..440: note = Vibrio toranzoniae
  REGION 1..440: note = tr|A0A120DGI9|A0A120DGI9_9VIBR Isochorismate synthase MenF OS=Vibrio toranzoniae OX=1194427 GN=menF; PE = 3 SV=1
MDEVDLSHFQQTLSALIERVHNAQASEVRCVEVLTQKPSFAFIEWLHAQPLFPKFYWQSRDTREEVVALGQLHTFSDPAPAYAILGEDQRIWGGRSFDGHTAKNRRCMESFFFLPQVELIRFDNTWSLAVNLSPDRVASINALNKLSVEAAILAPLSAHIEQITHVPEKELWGSLVNKVLQGISDEEYKKVVLARKTTLQLDAPICAAQLLKASYQQNHHSFHFMLVLDSKHSFIGSTPERLYSRHGTELDTEALAGTIGRGENATEDMELANWLSQDSKNLNENQYVVDDIIERLTPHSQMVHVEKDARLVRLRKVQHLKRNIHAQLNAGINGVQLLAALQPTAAVAGLPRKEAMDFILEHEPFARGWYAGSVGYISHQRAEFCVAIRSALVVNDQVQLFAGAGIVPGSVAEHEWQELNKKMSTLLSLISDHPPLGVAS

SEQ ID NO: 95154 - protein, 435 aa, Vibrio tubiashii
  REGION 1..435: note = tr|A0A0A5I849|A0A0A5I849_9VIBR Isochorismate synthase MenF OS=Vibrio tubiashii OX=29498 GN=menF PE=3; SV = 1
MSYFHQAVTELIERVKDAEDGVNRLVQVLAEKPDFAFIDWLEAQPLFPKFYWQSRDTREEVVALGQLHTFVEPAPAYAILAEDQRIWGGRSFDGQTSKNRRCMSSFFFLPQIELIRFDDKWSIAVNLNAEKHRTLASLYKLQLEVTPLPSVSSHIETVQHTPEKEQWTHLVEKVLTGIKNEQFKKVVLARKTEVSLDSPLCASQLLKASYQQNHHSFHFLLALDSKHCFLGSTPERLYARQGQELYTEALAGTIGRGTNASQDMELANWLSNDTKNLNENQYVVDDIIDRLSPHSQHVEVEQEVRLVRLRKVQHLKRSIHAQLHKGVNGVQLLSALQPTAAVAGLPREESMTFIQQHESFARGWYAGSMGFISQQRAEFCVAIRSALVLNDKVQLFAGAGIVPGSVAEHEWQELDKKMSTLLSLFSDNPPLGVAS

SEQ ID NO: 95155 - protein, 373 aa, Vibrio variabilis
  REGION 1..373: note = tr|A0A090TDG4|A0A090TDG4_9VIBR Menaquinone-specific isochorismate synthase OS=Vibrio variabilis OX=990271; GN = JCM19239_970 PE=4 SV=1
MSQLTTAIAQLISKLEKAPHGCKRIEQEIQGHPKFHCIDWLEAQPHFPKFYWQSRDTREEVVALGQLHTFSEASPAYAILADNQRVWGGRSFDGHTDKNRRCMSAFFFLPQVELIRFDTSWRIAVNISMSVDKAIGSLKQLMADVTELPPLASSIVGMTHTPNEQQWHDLVDDVLTGIEEDKFKKVVLARKTTIDVKDPISPAQLLKASYRENHHSFHFLMALSKELAFVGSTPERLYRRVGQQLETEALAGTIGRGDNAAQDMELANWLTQDLKNINENQYVVEDILQSLAPHSSEVHLEKELRLVRLRKVQHLKRNIVAQLSKGINAVQLLQALQPTAAVAGLPRSEALAYIQDNEPLLVVGMRVPSLFKP

SEQ ID NO: 95156 - protein, 393 aa, Vibrio vulnificus
  REGION 1..393: note = tr|A0A3Q0KZ21|A0A3Q0KZ21_VIBVU Isochorismate synthase OS=Vibrio vulnificus (strain CMCP6) OX=216895; GN = VV2_0835 PE=4 SV=1
MKREVIGYTKMANELLDNELSSSPFFFASPNNTMMGIGVQEERLQTLPFSELADVANNMLKNAKTSESDNPVLFGVVPFNQENMTRFVIPKTLYISSSTRASHTSASSAPQARLISSPSGHHYKQGVHDLLGMFANQELSKVVLSRAIEVATETDIQQQALLRNLLSINAKGYTFAAQIGDNQKLMGASPELLVAKKGSHLISNPLAGSRPRSESEQQNQASIQSLLNTGKDLHEHGLVVEEVERVMSKYCCNLYTPMVPSVIETQTMLHLSTQLEGQVLDPAINVLQVAAELHPTPAVCGYPREKAYEAIKRLEQFDRGYFTGMVGWCDSRGNGEWVVTIRCAEVQPRRMKVFAGAGIVNESQPQSELDETGAKMNTILKAAGIQLNEMLTA

SEQ ID NO: 95157 - protein, 435 aa, unidentified
  source 1..435: note = Vibrio xiamenensis
  REGION 1..435: note = tr|A0A1G7Y4M3|A0A1G7Y4M3_9VIBR Isochorismate synthase MenF OS=Vibrio xiamenensis OX=861298 GN=menF PE=3; SV = 1
MPYFHQAVSALIQRIERASAGANRLIQNIEQAPDFSFIDWLEAQPIFPKFYWQSRDGRETVVALGQLYTFTDPLPAYAILAEGQRVWGGRSFDGQTDKNRRCMASFFFLPQIELICQDDEYSLAVNLTSDINRTLASLKKLQHQVAPQPALQHQVKHMSHTPEREQWGKLVDKVLAGIEQQAFKKVVLARRTTVELDAPLSAAGLLKASIAKNRDSFHFLLALDQTHCFMGSTPERLYQRQGAELYTEALAGTSGRGETAEQDQALANWLSHDDKNLNENQYVVDDIVERLTPHSLDVDVEAKPQLVRLRKVQHLKRRIHATLKPGINGVQLLSALQPTAAVAGLPRDASMAFIRENEPFARGWYAGSMGYISHREAQLCVAIRSALVVEQSLHLFAGAGIVPGSIAEHEWQELDRKMSTLLSLINQYSPLGVAS

SEQ ID NO: 95158 - protein, 440 aa, unidentified
  source 1..440: note = Vibrionales bacterium
  REGION 1..440: note = tr|A0A366XR42|A0A366XR42_9GAMM Isochorismate synthase MenF OS=Vibrionales bacterium C3R12 OX=2267228; GN = menF PE=3 SV=1
MYEVDLSHFYQAIQTLVERVKSSTPKEVRLVERLDEKPPFVFIDWLEAQPIFPKFYWQSRDTREEVVALGKVHTFSDPAPAYTILGEGQRIWGGRSFDGHTEKNRRCMESFFFLPQIELIRYDDQWSIAVNLPSEKQTLINALNKIVCDVPSLLPLSAQIEHTEHTPSKAIWADLVERVLSGIAADDFKKVVLARKTVLKLDAPICSAQLLKASYEQNHHSFHFMMSLDSKHSFMGSTPERLYSRFGQELHTEALAGTIGRGKNATQDMELANWLSQDAKNLNENQYVVDDIVERLTQHSETVNVQQEARLVRLRKVQHLKRSIHAQLKPNTNGVQLLGALQPTAAVAGLPRAEAMQFIQENEPFARGWYAGSVGYISHQKAEFCVAIRSALIVDNQVQLFAGAGIVPGSNAEHEWQELNKKMATLLSLISDNPPLGVAS

SEQ ID NO: 95159 - protein, 463 aa, Virgibacillus chiguensis
  REGION 1..463: note = tr|A0A1M5VSQ9|A0A1M5VSQ9_9BACI Isochorismate synthase MenF OS=Virgibacillus chiguensis OX=411959; GN = menF PE=3 SV=1
MIEVQGQQVEELLREAINQMGLKQSAQLVSITKRVEAQDPVLFFASAAKLNKERCFWMSTKDAFSVVGVGNVFEINANEDRFQYIEETWKKLIDDVWVYNPFKAPGTGLVTLGGLDFDPKKPRTDLWNDFPRLQFKIPEYILTKNNSDFYLTINIKVCKDDHPIQLLKAIETVETKLFQTAKEQLDLPKIIHKKMIAPEQWKNTVQRAKQEIQQKQMDKIVLAREMRLTFSKQVDVSQVLSDLIDKQSNSYIFAFEQSDSCFVGATPERLVRVENKKLLSTCLAGTAPRGATEEEDQRIAAMLFQDPKNREEHDFVVQMIKQGINKYCTDVQIPDTPVVYPLKNLQHLYTPVTGVLKDGYTIFNVIKELHPTPALGGVPRDLSMTFIRNNEQLDRGWYGAPVGWLDSNNYGEFAVAIRSALIQEDEASLFAGCGIVKDSDPEEEFAETEIKFSPMLTVLGGQP

SEQ ID NO: 95160 - protein, 464 aa, Virgibacillus dokdonensis
  REGION 1..464: note = tr|A0A2K9J4E4|A0A2K9J4E4_9BACI Isochorismate synthase MenF OS=Virgibacillus dokdonensis OX=302167; GN = pchA PE=3 SV=1
MIEVQGQQVEELLREAINQMGLKQRTQLVSITKRVEAQDPVLFFASAAKLNKERCFWMSTKDAFSIVGVGNVFEINANEDRFQYIEETWKKLLDDVWVYNPFKAPGTGLVTLGGLDFDPKKPRTDLWNDFPRLQFKIPEYILTKNNSDFYLTINIKVCKDDHPIQLLKAIEAVETKLFQTVKEQLDLPKIIHKKVIAPEQWKKTVQRAKQEIQQKQMDKIVLAREMRLTFSKQVDISQMLSDLIDKQSNSYIFAFEQSDKSCFVGATPERLVRIEKKELLSTCLAGTAPRGATVEEDQRIAATLFHDPKNREEHDFVVQMIKQGINKYCTDVQIPDIPVVYPLKNLQHLYTPVTGILKDGYTIFNVIKELHPTPALGGVPRDLSMTFIRNNERLDRGWYGAPVGWLDSNEYGEFAVAIRSALIQDDEASLFAGCGIVKDSDPEEEFAETEIKFSPMLTVLGGQA

SEQ ID NO: 95161 - protein, 461 aa, Virgibacillus halodenitrificans
  REGION 1..461: note = tr|A0A1J0H330|A0A1J0H330_VIRHA Isochorismate synthase MenF OS=Virgibacillus halodenitrificans OX=1482; GN = menF PE=3 SV=1
MIEILEEQLEKIIDEAIPNINSADDTQLISITKPVKNINPLHFFHAASSTGKDRVFWSSTQEDFFIAGIGNTAQLRVEGLPSQEVEKKWRAILDKAIIYNDNKVPGAGIVALGGISFDPKKERTPLWENFNDSEFTVPEFLLTQNNGANYYTVNILVRKGDIAEQVANEIRGMEEILFSDTTLPSTDVAILNRYEVAPEKWKESVELATREIDKGKASKIVLAREIRLKLNKSVNIASVLEKLLHTQPNSYIFAFEKGKDCFVGATPERLVRLDKRKLLSTCLAGTAPRGKNKEEDREISKSLLHDEKNRQEHEFVVQMIKQAISHYCKDINIPEKPVIYPLKNLQHLYTPVTATLLGDYSIFDIIEQLHPTPALGGTPREESLAFIRENELLDRGWYGAPVGWLDSNGSGEFAVAIRSGLIQDDEASLFAGCGVVKNSDPEKEYEETNIKFLPMLSVLGG

SEQ ID NO: 95162 - protein, 463 aa, unidentified
  source 1..463: note = Virgibacillus indicus
  REGION 1..463: note = tr|A0A265N972|A0A265N972_9BACI Isochorismate synthase MenF OS=Virgibacillus indicus OX=2024554 GN=menF; PE = 3 SV=1
MIEIKEDQLEHILDRAIQSISSDDVLQLVSITKSINKTDPLTFFDGVKTLKKDRIFWTSTTDEFCLAGVGSAYEISADEARFEITEDRWNSLLDEAIIYNPYQVPGTGVVALGGMAFDPKKKQTALWKKFKPSQFTIPEYMLTKNENSYYFTVNIVVKKDDHPVQLAKGIMEAEAVIFSNQTSASGNAAISKKKEIKPEQWKETVRQATEEIREKQTEKIVLAREMRLKFNKHAEIGQIIKNLMDTQSNSYVFAFEKGEDCFVGATPERLVKLENEHLLSTCLAGTAPRGATPAEDKKISNDLLHDDKNRQEHDFVVEMIKQSIKKYCTDINIPEEPVIYPLKNLQHLYTPVTAILKNSYSIFDIIKQLHPTPALGGTPKKEAMEFIREHELLDRGWYGAPVGWLDSNKNGEFAVAIRSGLIQGNEASLFAGCGVVKNSNPEAEYEETNIKFLPMLSVLGGQA

SEQ ID NO: 95163 - protein, 464 aa, unidentified
  source 1..464: note = Virgibacillus massiliensis
  REGION 1..464: note = tr|A0A024Q9R3|A0A024Q9R3_9BACI Isochorismate synthase MenF OS=Virgibacillus massiliensis OX=1462526; GN = entC PE=3 SV=1
MIEVQEQQVEDILQDAIQRITTSGKDFQLVSITKKIQTTNPVHFFEAALRLNKERVFWTSAKESFTMTGVGNAFEMDANENRFSFIESAWEQLRGQAVIYNPYEVPGTGLVSLGGMDFDPEKKRTELWGDFPSIYFTVPEYLLTKFENECYLTVNIKITKEDHVIQLSNQIRNDERILLSLKELEKQPLEIVQQHDIAPDQWKQIVQKATEEISHDQVDKVVLAREVRLKLNRDVNRAAVIEKLIATQSNSYVFAFEQKNSCFIGASPERLVKIKNKELLSTCLAGTAPRGKTNEQDKKIANALMQDMKNRQEHDFVVQMIKQGVAKYCEQVYVPEVPIIYPLKNLQHLYTPVTGVLKQGHSIFDIVSQLHPTPALGGLPRTASMLFIRENELLDRGWYGAPVGWFDYNENGEFAVAIRSGLIQKDEASLFAGCGVVKDSQPEEEFEETRIKFAPMLSVLGGES

SEQ ID NO: 95164 - protein, 461 aa, Virgibacillus necropolis
  REGION 1..461: note = tr|A0A221MBB9|A0A221MBB9_9BACI Isochorismate synthase MenF OS=Virgibacillus necropolis OX=163877; GN = menF PE=3 SV=1
MIETKEKLIESILNKGIQKTTRTNHIQLVSITKKIDAIDPLHFFEAAKQLKEDRTFWSSTAEDFFMIGVGTSYKIEATDNRFGETDEQWRRVKQQAIVYDPYQQPGTGLVAMGGMAFDPGKDRTELWENFSDSEFTIPSYMLTKHGNNHYFTTNVHVSKNDQVEDLANTIDENFTTLLKQSVTMPVNTVIIDKNEIEPEKWKQTVDDATDKIKTSNVEKIVLSREVRVKLNQKAEIATVLHDLLATQTNSYVFAFEHGEDCFVGATPERLIRIENEHLLSTCLAGTAPRGKTVEEDNALANQLFNDKKNRSEHDFVVKMIRKSISPYCTTIEVPNEPTIYPLKNLQHLFTPVTAKVKPDVSLFDIIKQLHPTPALGGVPRQESLQFIREYELMDRGWYGAPIGWVDHNNNGEFAVAIRSGLIQGDAASLFAGCGVVKDSDPEAEYEETNIKFLPMLTVLGG

SEQ ID NO: 95165 - protein, 463 aa, Virgibacillus pantothenticus
  REGION 1..463: note = tr|A0A0L0QUD6|A0A0L0QUD6_VIRPA Isochorismate synthase MenF OS=Virgibacillus pantothenticus OX=1473; GN = menF PE=3 SV=1
MIGVQDQQVEELLRDAIHQMPLTKEAQLVSITKQVEPKDPVLFFAAAARLNKERCFWTSTKDSFSIVGVGNIFEISANQDRFQYTETTWKKLLGDVRIYNPFQAPGTGLVSLGGLDFDPQKPRTELWADFPRVKFTVPEYMLTKNMDDVYFTINLKIRRDDHPIQLMKAIEAAERILFQASKEQHGTPRLVNSKVIAPEQWKQTVQKAKQEIQQKQMDKIVLARELRLQFNKQVNISHILGDLIKKQSNSYVFAFEQNNSCFVGATPERLVKVDKQELLSTCLAGTAPRGKTEVEDQQIADNLLHDQKNREEHDFVVQMIKQGLNKYCTDVHIPDTPVVYPLKNLQHLYTPVTGRLKDGYTIFNVVKELHPTPALGGVPRDLSMTFIRDYERLDRGWYGAPVGWLDSNDHGEFAVAIRSALIQEDEASLFAGCGIVKDSNPEEEFEETRIKFSPMLTVLGGQA

SEQ ID NO: 95166 - protein, 461 aa, unidentified
  source 1..461: note = Virgibacillus phasianinus
  REGION 1..461: note = tr|A0A220U465|A0A220U465_9BACI Isochorismate synthase MenF OS=Virgibacillus phasianinus OX=2017483; GN = menF PE=3 SV=1
MIETKEEIIESTLNHAKNKTLSTNHIQLVSITEKIDTVNPLHFFEAAKQLQVNRTFWCSTAEDFLMVGVGNTYEIEATDNRFQETDEQWNRIKQEAIIHDPFQQPGTGLVVMGGMSFDPKKERTSLWENFSESAFIVPAYTLTKYKETYYFTINVQISSHDQVSMLAKEINESRHVLLKQSEKMPIKTKIADKYEIAPEKWKETVVEATNQIKTSNLEKIVLSREVQIKLNKKAEITAVLDDLLATQTNSFVFAFEHGEDCFVGATPERLIKIQNEKLLSTCLAGTAPRGQTPEEDEAFANQLYNDEKNRSEHDFVVKMIKQAIRPYSANIEVPNEPIIYPLKNLQHLYTPVTATVRQDVSIFDIIGKLHPTPALGGVPRQASLQFIREHELLDRGWYGAPVGWIDHNNNSEFAVAIRSGLIKGDTASLFAGCGVVKDSDPEAEYEETNIKLVPMLSVLGG

SEQ ID NO: 95167 - protein, 461 aa, unidentified
  source 1..461: note = Virgibacillus profundi
  REGION 1..461: note = tr|A0A2A2I9J7|A0A2A2I9J7_9BACI Isochorismate synthase MenF OS=Virgibacillus profundi OX=2024555 GN=menF; PE = 3 SV=1
MIEIKEKQLEHLLDSAIKEIQYHDELQLVSITKEISYANPFHFFDKAKAIGKDRTFWTSTGDQFYLVGAGNAYEIIAEDSRFEGTEEGWNNLINEAIIHNKYKYPGTGIVALGGMSFDPRKAPSDLWNKFKPSQFTIPEYMLTIRKNNFYFTANVFVKKDDHSVQLANDIKRHENELISQMETSLTAINIKDKKEIEPDKWKETVRYATEEISDHKAEKIVLAREIRLKFDKQADIGTILNKLIDTQSNSYIFAFEKGEDCFVGATPERLVRVENKRLLSTCLAGTAPRGKTKEEDERISHDLLNDEKNRQEHDFVVKMINHSIKNHCTNIKIPDEPVIYPLKNLQHLYTPVTAKLKDRYSIFDIIKQLHPTPALGGTPRTESLAFIREHELLDRGWYGAPVGWLDSNQNGEFAVAIRSGLIQGDEASLFAGCGVVKDSDPEAEYEETNIKFLPMLSVLGG

SEQ ID NO: 95168 - protein, 461 aa, Virgibacillus salinus
  REGION 1..461: note = tr|A0A1H0ZPW5|A0A1H0ZPW5_9BACI Isochorismate synthase MenF OS=Virgibacillus salinus OX=553311 GN=menF; PE = 3 SV=1
MIEIKEELIESLLEKAIDQAKSNNKTQMISMTKEINETDPLRFFESAKKLGMDRTFWTSTSEQFFIVGVGSAFQIDANEYRFQNTEKQWKKLLRDAIIHNPYKVPGTGMVTLGGMSFDPSIRKSDLWRKFGHSSFTIPKFILTVNEGKYYVTTNVQVNQGDHSRQLANGIKHAEETLMSYSTTLPDQTRIHSKDEIAPQQWMDTVERATEKINQDEAEKIVLAREVRIKLTGDASITAVLDKFISSQTNSFIFAFERDGDCFVGASPERLVKLQNQQLLSTCLAGTAPRGKTKEEDRKISYKLLHDEKNRSEHDFVVNMIKNAMELYCTSIQIPKEPVIYPLKNLQHLYTPVTATLKKGYSIFDIIQQLHPTPALGGVPREESLKFIREQEQLDRGWYGAPIGWLDSNQNGEFAVAIRSGLIQGDEASLFAGCGVVKDSDPQAEYEETNIKFLPMLSVLGG

SEQ ID NO: 95169 - protein, 461 aa, Virgibacillus sp.
  REGION 1..461: note = tr|A0A075JQW4|A0A075JQW4_9BACI Isochorismate synthase MenF OS=Virgibacillus sp. SK37 OX=403957 GN=menF; PE = 3 SV=1
MIEIMEEQLEKIIDEAIPNINTADDYQLISITKQVNKINPLHFFHAASYTKRDRVFWSSTQDNFFIVGVGNAAQLRVEGLSSRNVEKKWRELLNKAIIYNDSKVDGAGIVALGGMSFDPKKERTPLWKNFSDSQFTVPEFLLTQNNGASYYTINILVRKGDHAEEVANEIRSMEEILFSKTALPVTDVTIMNRYEVAPEKWKEAVELATREIGKGSASKIVLAREIRLKLNKSVNIASVLEKLLHTQPNSYIFAFEKGEDCFVGATPERLVKLNKRELLSTCLAGTAPRGKNKKEDKEISENLLHDEKNRQEHEFVVQMIKQAISHYCKDINIPEKPVIYPLKNLQHLYTPVTATLMGHHSIFDIIEQLHPTPALGGTPREESLAFIRENELLDRGWYGAPVGWLDSNGSGEFAVAIRSGLIQDDEASLFAGCGVVKNSDPEKEYEETNIKFLPMLSVLGG

SEQ ID NO: 95170 - protein, 404 aa, Viridibacillus arvi
  REGION 1..404: note = tr|A0A0M0LNG0|A0A0M0LNG0_9BACL Isochorismate synthase OS=Viridibacillus arvi OX=263475 GN=AMD00_00350; PE = 4 SV=1
MRENSTVLKKELLDDYKEGDFFLATPSQTLLGKGSFLTVPSDKENRNQMKSLAERVAAVLKTAKEQGHANPMVTGAVPFDYRKDAQLIVPANIWSSVPMQDKCTDQPTKTKKPIYEIKSVPEPSQYMAGVERGLTHIKSGHLDKIVLSRSLHLTSSETVNINRLLQNLACHNKNGYTFAVDLPQSESKIVDSLISKTLIGASPELLVSRTGLEVVANPLAGSRPRSDDPIEDKRRASELLSSTKDLHEHAVVVHAVAEALRPFFKKIDVPERPIVIHTETMWHLSTEVTGELEDPATSSLELAIALHPTPAVCGSPSDLARVAIQEIEPFDRGFFTGMVGWCNAEGDGEWIVTIRCAEVEKQTLRLFAGAGVVAESKPEEELAETSAKFQTMLRAMGIDAKSLN

SEQ ID NO: 95171 - protein, 424 aa, Volucribacter psittacicida
  REGION 1..424: note = tr|A0A4R1FXB0|A0A4R1FXB0_9PAST Isochorismate synthase MenF OS=Volucribacter psittacicida OX=203482; GN = menF PE=3 SV=1
MDSLQQLKSKIADILAQYQPNPTPRIRAFKAQITSSIPLLSWLKAQAIYPQFYFKQRDQEVTFAAIGKVRSFSDKFLAQAFMDQYGFPLVGGIQFEGNTFFFLPQLLLQQQQDKLDCWLFIDEQIPLAQQFEPLMATIAHCQPLQRIEHIKMIDQYCQASFNQWQSWIKQGLQGFKQGELSKVVLANQYHLTADRSINGKDMLWQSEQVNPHCYHFLLAENEDCTFLGSSPERLYRREQQQLNTEALAGTAFMDKDQAKNQQQAHWLLQDPKNQYENQLVVDGICQHLSPYAQHIEVKPTALVRLRNVQHLCRKIQVVLKPDCYDVHCLQAIHPTPAVAGLPQQQARDFIKNCENFHRTWYAGCLGVMQPQQAEFCVTIRSAFVEHNKIRVFAGAGIVEGSDPLLEWQEIERKAKGLISLFNQT

SEQ ID NO: 95172 - protein, 337 aa, Waddlia chondrophila
  REGION 1..337: note = tr|D6YW64|D6YW64_WADCW Putative menaquinone-specific isochorismate synthase OS=Waddlia chondrophila (strain ATCC VR-1470 / WSU 86-1044) OX=716544 GN=menF PE=4 SV=1
MIKSGAVISIRHDQVVIGSGRKEMVSTPKENEKPAFYFPDFFLEDPKPWYQYEESEQLTTEQLATRLPASGSSNGRSWSIQGDEIYSNTFSRLQISFQKGELKKAVPYLFYTSDQPFKVQQSLLSLLNYSSQHPTFLYGFWEDEKGILGGSPELLFHIASDGILTTAAIAGTVESAYEDRLLSDPKLKIEHDLVIEGICASLAPFGKAEVGKTEILRLSHLSHAKTPISVQLERIDCIDALTRALHPTPALGAFPKAGGLNWLANYAKLLPRGRYGAPVGVKIGNHFSCYVAIRNIQWEQGCIRLGVGGGVVRASNEKDERDELALKFEATRSMLNI

SEQ ID NO: 95173 - protein, 385 aa, Weissella cibaria
  REGION 1..385: note = tr|A0A0D1KKL9|A0A0D1KKL9_9LACT EntC protein; OS = Weissella cibaria OX=137591 GN=entC PE=4 SV=1
MSFPTEKQLCDRFDRSEHAVYFATADKRTRYYGFGVREEKFGADFQDVAAWAREQRYPVFGGFSFDEQSVTDSALMNGYFVLPEVLYDITDQHLWGRETDPFGAPTPIAGPAITSQTDEYDWPDRVQTAVDDMQQNPNHQKVVLGRQRQVRLTGKLNLATLLADLATQQPNSYHFVLKRGDEVFVSATPERLAKVNRGQFETAGVAGTIRRGTDEAEDARLATELLQDPKNLQEHAYVVETIVSRLQDVATLTLPDGPQIMKNPQVQHLYTPIVGQLNGDNTVLALAERLHPTPALGGKPVDWAMATIQTIEQHPRGLFAGPIGVVKPDGDGEMIVGIRSMWLKQWTATLFAGAGILADSDVQAEFEETGLKMTPMMNLLKEQDK

SEQ ID NO: 95174 - protein, 385 aa, Weissella confusa
  REGION 1..385: note = tr|A0A1T4J4V3|A0A1T4J4V3_WEICO Menaquinone-specific isochorismate synthase OS=Weissella confusa OX=1583; GN = FM131_01770 PE=4 SV=1
MSFPSDKQLRDRFAQAENAVYFATADKRSRYYGFGIAEELIGASFEEVADWAKQQRYPVFGGFAFDDQTVPDSQLMNGYFVLPAVLYDITDQYLWGRETNPFGAPYRQETVAIVATTDETDWPERVNNAIQDMTENDTHQKVVLGRQRQVTLSGQLNLAKLLADLADQQPNSYHMVIKRGDEVFISATPERLAKVNRGQFETAGVAGTIRRGETETEDGQLADELLHDAKNLQEHAYVVETIVDRLGDVADLTLPDGPQIMKNPQVQHLYTPIAGKLRGENTVLALAERLHPTPALGGKPVDWAMATIAQIERQPRGLFAGPIGVVKPDGDGEMIVGIRSMWATGTQANLFAGAGILADSNADSEYAETGLKMQPMMNLLEGQAK

SEQ ID NO: 95175 - protein, 393 aa, Weissella hellenica
  REGION 1..393: note = tr|A0A5B8TL56|A0A5B8TL56_WEIHE Isochorismate synthase OS=Weissella hellenica OX=46256 GN=FGL75_01165; PE = 4 SV=1
MMTFVTEEALQWSFELANDAVYFASPDGQTKYYGFGKQAELIGGSFEQAQIWLAKVQKNQLQPVFGGFAFDEQQINDSRLMNGYFFQPAVVYDVVKQQVMGQKIDLVRQTQSSGTDFATIKDETDWHTRIQVAIDDMQQNMVHEKVVLGRQREIQLTAALNERQIIKSLQKTQPTSYHFVLKHGGELFVSATPERLVKVANGQLATAAVAGTIKRGENESADEALANELWHDQKNRREHQTVVATIKSNLEAANITQLKMPETPQILKNPQVQHLYTPITGTLSADNSLLAIIKQLHPTPALGGKPSTWALETIAAIEKYPRGLFSGPIGVIMPDGDGEFIVGIRSMWYRNKLVNLFAGAGILADSDAAMEYQETDLKLLPMMNVLKEQTLHD

SEQ ID NO: 95176 - protein, 393 aa, Weissella paramesenteroides
  REGION 1..393: note = tr|C5R8H2|C5R8H2_WEIPA Isochorismate synthase; OS = Weissella paramesenteroides ATCC 33313 OX=585506; GN = HMPREF0877_0267 PE=4 SV=1
MVKFLTEEELQKTFALANDAVYFATPDGQTKYYGFGKQAELIGASFAQVKTWLATLKNDENKPVFGGFAFDKQQIADSKLMNGYFIQPAVVYDVINHEMLGLPIDLVRQTTTFDTNVMQITDETDWPSRIQTAIDDMKQNKQHEKVVLGRQRQVTLSDPLDEQRLLSKLQNSQSTSYHFVLKHCGELFVSATPERLVKVTGGQLSTAAVAGTIKRGADSVSDQALADELWHDSKNRVEHETVVAEIKERLQAANVKSLQVPTEPQILKTPQVQHLYTPITGQLASDSSLLEIAAELHPTPALGGKPRDWALAEIAQIEKMPRGLFSGPIGMMTMDGDGEFIVGIRSMWYRKNLATLFAGAGILAASDAQMEYQETGLKLLPMMNLLKEQINND

SEQ ID NO: 95177 - protein, 384 aa, Weissella soli
  REGION 1..384: note = tr|A0A5B8SJX4|A0A5B8SJX4_9LACT Isochorismate synthase OS=Weissella soli OX=155866 GN=FGL88_07710 PE=4; SV = 1
MSFPSEKELWQRFELAEVAVYFATADKKSRYYGFGVADEIFSRDIHEIATWAAGKNYLVFGGVPFDDQLHMATMMNGYFLQPEVLYDIAEQHLWGYETNVVTNRSKRRRPEIERVVDETNWVQRVQHAIDAMQSDGTKQKVVLGRQRQVTLSEPLDMAKLIADLQMTQPHNYHFVLKRGNDIFISATPERLVKINDGHLATAGVAGTARRSQDETEDLQLAATLLNDPKNLQEHAIVVNRIVERLAGMAALTVPKGPTIMKNPQVQHLYTPITGQVNDGVTTLSIVDRLHPTPALGGQPEEWALTQIAQLEQNPRGLFAAPVGVLRPSGDGEMVVGIRSMFAHAGKVDLFAGAGILADSDATQEYEETALKMQPMMKLLEKQHD

SEQ ID NO: 95178 - protein, 385 aa, Weissella sp.
  REGION 1..385: note = tr|A0A139R4V2|A0A139R4V2_9LACT Isochorismate synthase / Menaquinone-specific isochorismate synthase; OS = Weissella sp. DD23 OX=1777865 GN=WEIDD23_00640 PE=4 SV=1
MSFPTEKQLRDRFDRSEHAVYFATADKRTRYYGFGVREEKFGADFQDVAAWAREQRYPVFGGFSFDEQSVTDSALMNGYFVLPEVLYDITDQHLWGRETDPFGAPTPIAGPAIISQTDERDWPDRVQTAVDDMQQNPNHQKVVLGRQRQVRLTGELNLATLLADLATQQPNSYHFVLKRGDEVFVSATPERLAKVNRGQFETAGVAGTIRRGADEAEDARLATELLQDPKNLQEHAYVVETIVSRLQDVATLTLPDGPQIMKNPQVQHLYTPIAGQLNGDNTVLSLAERLHPTPALGGKPVDWAMATIRTIEQHPRGLFAGPIGVVKPDGDGEMIVGIRSMWLKQQTATLFAGAGILADSDVQAEFEETGLKMTPMMNLLKEQDK

SEQ ID NO: 95179 - protein, 378 aa, Weissella viridescens
  REGION 1..378: note = tr|A0A3P2RDI2|A0A3P2RDI2_WEIVI Isochorismate synthase OS=Weissella viridescens OX=1629 GN=D3P96_02205; PE = 4 SV=1
MQKWMTEFSQNENAVYFATADKTTQLVGLGISDEISGWTDETILNQWVQHQNSAVFGGFNFDADQALTGLMGGYFFAPEQLIDLNANSEWTASVPQVTHSSLHLVDEMDETDWTTRMQPVLTQMQIDPTKQKVVLGMQATLTFDGPIQVANLLESLVAQQPESYHFVLKRGTDVFVSATPERIVKLSGNQFETAAVAGSIRRGEDTETDTALADALWHDQKNREEHQIVVDMLVNQLADVSTLTYASTPQMLQTPQIQHLYTPIQGQLNSETALLALVERLHPTPALGGWPRDWAKSIIEDYELAPRGLFAAPLGYYLPNGTGEFIVGIRSMLVQADQARLFAGAGILAESDLAQEAQEIQLKMTPMRQLLEDQTDAK

SEQ ID NO: 95180 - protein, 372 aa, unidentified
  source 1..372: note = Winogradskyella psychrotolerans
  REGION 1..372: note = tr|S7VMW2|S7VMW2_9FLAO Isochorismate synthase; OS = Winogradskyella psychrotolerans RS-3 OX=641526; GN = ADIWIN_3369 PE=4 SV=1
MDAISFFDALEQQYKNNLPFVVYSRPINSIIKCWLQEDDSVYKSETFTESGFLFAPFDIKQNSILLPKEHCLYSEITTSNLEVEDFEPTEILQSETEKIQHIDLVSKGIESIKNQDLQKVVLSRCETKSLQDTNPLTIFKRLFNTYTNAMVYCWYHPIVGLWIGATPELLLKVEGKRLTTISLAGTQPYQRESEPTWTNKEFEEQKIVTDYITEQLKPYTSNINVSEVDTVRAGNLLHLKTRIISVLKDGADLKSIIEALHPTPAVCGFSKAKAKDFILNNENYNREYYTGFLGELNLKQSRTRNTNRRNVENNAYAVVKTQSNFYVNLRCMQLKDAKANIYVGGGITKDSNPDNEWEETVNKTGTINTVLN

SEQ ID NO: 95181 - protein, 483 aa, Xenococcus sp.
  REGION 1..483: note = tr|L8M8A4|L8M8A4_9CYAN Isochorismate synthase family protein OS=Xenococcus sp. PCC 7305 OX=102125; GN = Xen7305DRAFT_00034190 PE=4 SV=1
MTQSKITIPVISQEESNLVLDNGDFDDFWNNSKLQFTVTKYTKILSYAQKIPLVDPLAFLQKFSSKNAVHFYWENPNKKESIVACGITKESLIRSGNRFEITQKFVDDCFNQILPQGEVALSRTAPRIFCSFSFFSDASVSDQDFPSATVFLPRLQLVKKNKQCFLIVNYPLKNPQDKSEILNKINYKVATIDWQNQENLVTDGQIKSNWEKQNIFSTEHSQYFRNVVGSALESIAMNEFSKIVIAQATDITSKIPFKVIQSLHNLRERHPDCYIFSIANGQGKNFIGASPERLVSIQNRQLVTDALAGSAPRGKTNAEDVHWSNLLLRSRKEQREHQAVSDFLIARLRQMGLKPYQLPLQLLRLSNIQHLWTPIYAHLPEYIGPLEIVAQLHPTPAVAGVETEIACEKIRHYERFDRSLYAAPLGWIDNQGNSEFIVGIRSALIEGKHARLYAGAGIVSGSNPDKEFIEIQLKLQSLLKALV

SEQ ID NO: 95182 - protein, 389 aa, Xenorhabdus bovienii
  REGION 1..389: note = tr|A0A077NYI4|A0A077NYI4_XENBV Isochorismate synthase 1 OS=Xenorhabdus bovienii str. oregonense; OX = 1398202 GN=entC PE=4 SV=1
MSGIVNDLLPLTLQEDDFIFLSPHKSLLARGCLATLTHPASSGHHVEGEFQQRVQQLLRQTQQSGVENPIIVGAIPFDKRQPCSLFIPQTYHWFDRHAFNLSDSPVQVEGQAHYIPDHDAFCAMVESALSPLRIGELDKVVLSRLLQIESIPPLSALNLWLQLNRQNPESYNFHLPLADGTLIGASPELLLRKEGNVLRSCPLAGSVRRGDNTASDRNAKEKLLASGKDRHEHRVVTEAIRRQLTDLCQSLTIPEPSLLSTPTLWHLATEIQGILADDRDSALSLACLLHPTPALCGAPYTSSRNLIGALEPFDRGWFGGIVGWCDARGNGEWVVAIRCGKVRPHQIELFAGAGIVPDSVPENEWMETHTKFNTMLNALGFAMQQEQTL

SEQ ID NO: 95183 - protein, 461 aa, Xenorhabdus budapestensis
  REGION 1..461: note = tr|A0A2D0J184|A0A2D0J184_XENBU Isochorismate synthase MenF OS=Xenorhabdus budapestensis OX=290110; GN = menF PE=3 SV=1
MLLVGMFVDKIANIIADVCEILNTENVSEVGIQSFCFSLPATSETDWLEWLAAQPHYPQFYWQHRDGHEEVAACGQIRLFSNAIKAETFLHQHIQFPQMRIWGLNAWEKTDVCHIRNNQNKEQLQENEKNTGDEESYLFLPRMEIRRCHGATRLYLNINGQADIDNIHLFLRQIVPHQPFQTSYAAVLNATHMPESEQWNILLKQALNAITQKKMEKVVMARKTELTLNMPLQAAQFMASSRGVNHRCYHFMLAFNDNQAFLASTPERLYYRYQLQVFTEALAGTTENSEDDQKAKELGQWLLEDKKNQHENLIVVNDICQRLQGGVESIDVAPPDVIRLRKVQHLRRHIHGVLNQVCDSDCLHRLQPTAAVAGLPREAARQFLAENEPFHRGWYAGSAGYLCLEQSEFAVSLRCAYINGDLLSLYAGAGIVSGSDPEQEWIEIENKAAGLRSLLGSLANE

SEQ ID NO: 95184 - protein, 454 aa, Xenorhabdus cabanillasii
  REGION 1..454: note = tr|A0A3D9UE42|A0A3D9UE42_9GAMM Isochorismate synthase MenF OS=Xenorhabdus cabanillasii OX=351673; GN = menF PE=3 SV=1
MDQIANIIADICEILNTKNISEVGIQSFSFSLPATSDTDWLEWLAVQPHYPQFYWQHRDGHEEVAACGQIRLFSNAIKAEKFLHQHAQFPQMRIWGLNAWEKTDVCHIRNNQNKEQLQESKKSTGNEESYLFLPRMEIRRYHGATHLYLNIDGQADIDNIHLFLRQIVPRQPFQTSYAAVLNATHTPENEQWNILLKQALNAITQKKMEKVVMARKTELTLNMPLQAAQFMASSRGVNHRCYHFMLAFNDNRAFLASTPERLYYRYQLQIFTEALAGTTVNSEDAQKAKELGQWLLADKKNQHENLIVVDDICQRLQGGVESIDVAPPDVIRLRKVQHLRRHIHGVLNQVCDSDCLHRLQPTAAVAGLPREAARQFLAENEPFHRGWYAGSAGYLCLEQSEFAVSLRCAYINGDLLSLYAGAGIVSGSDPEQEWMEIENKAAGLRSLLGNLANE

SEQ ID NO: 95185 - protein, 447 aa, Xenorhabdus doucetiae
  REGION 1..447: note = tr|A0A068QWS1|A0A068QWS1_9GAMM Isochorismate synthase MenF OS=Xenorhabdus doucetiae OX=351671 GN=menF; PE = 3 SV=1
MGRDVNQITNIIADICELLNTENVSETGIQSFSFVLPVDSGAHWLEWLSAQSHYPQFYWQHRDGDEEVVACGQIRLFSKVTDAEAFLRQPHQFAQMRLWGLNAWDKVNFTPSQHENIIGGESYLFLPRLELRRHRGENRLYIHVDGQADLENARQFLKQLLPGQPLLPLQTAILKAKHTPESAQWHRLLEHALNAISQNKIEKVVIARKTELTLNSPLHTAQLMAASRSVNHGCYHFMLAFSAEHAFLASTPERLYYRNQLQFYTEALAGTVANAEDDQQAAELGQWLLEDEKNQHENLIVVDDICQRLRGGVVSVDVAPPDVIRLRKVQHLRRPIRGVLNHVCDSDCLRRLQPTAAVAGLPREAARQFLANHEPFKRDWYAGSAGYLGLEQSEFAVSLRCACIHDKVLALYAGAGIVAGSDPAQEWLEIENKAAGLRTLLTSMIDE

SEQ ID NO: 95186 - protein, 440 aa, Xenorhabdus innexi
  REGION 1..440: note = tr|A0A1N6MVY0|A0A1N6MVY0_9GAMM Isochorismate synthase MenF OS=Xenorhabdus innexi OX=290109 GN=menF PE=3; SV = 1
MGKIVDQIAGIIADVCETLSAKNVSEAGIQMFCFPLPVNDNTDWLEWLAAQPHYPQFYWQHRDGHEEVAACGQIRLFNNAAQAEMFLNQYAQFPQMRIWGLNGWDKEENTDNEESYLFLPRIEIRRCHEATYLYLNIDGQSDLDNIHQFLRLISPHQPFQPSCTAVLNTKHMPECEQWNILLEQALDAITRKRMEKVVMARKTELMLDMPLQAAQFMAASREVNHHCYHFMLAFSHTQAFLASTPERLYYRHQRQLFTEALAGTTINADDDQKAKELGQWLLQDKKNQHENLLVVDDICQRLQGGVTAIDVAPPDVIRLRKVQHLRRHINGFLNQISDSDCLRRLQPTAAVAGLPREAARQFLAENEPFHRGWYAGSAGYLGFEQSEFAVSLRCAYIDGALLSLYAGAGIVSGSDPEQEWREIENKAAGLRSLLGNLAVE

SEQ ID NO: 95187 - protein, 462 aa, unidentified
  source 1..462: note = Xenorhabdus khoisanae
  REGION 1..462: note = tr|A0A0J5FUB2|A0A0J5FUB2_9GAMM Isochorismate synthase MenF OS=Xenorhabdus khoisanae OX=880157 GN=menF; PE = 3 SV=1
MGKDVNQTADVIAGICEYLNAGNVSEIGIQSFSFTLPAGSSVHWLAWLSAQPHYPQFYWQHREGHEEVVACGQIRLFSNIAGAEKFLQQYQQVKQMRLWGLNAWDKVDSEHCHHSYFYHDNVWQDKHENQDKHENITGRESYLFLPRLELRRHRSENRLYINVDGRADIENACQFLRQLLPHQPFLPLQTTILEAKHVPESEQWNILLEQALEAITKSKMEKVVIARKTELTLNSPLQAAQFMAASRGVNHRCYHFMLAFSANHAFLASTPERLYYRNQLQFCTEALAGTVANSEDDQEAAKLAQWLLEDKKNQHENLIVVDDICQRLQGGVASVDVTPPDVIRLRKVQHLRRHIRGVLSHVCDSDCLRRLQPTAAVAGLPREAARQFLSDNEPFNRGWYAGSAGYLCLEQSEFAVSLRCAHIYDNLLSLYAGAGIVAGSDPEQEWIEIENKAAGLRTLLVN

SEQ ID NO: 95188 - protein, 458 aa, Xenorhabdus mauleonii
  REGION 1..458: note = tr|A0A1I3IZ96|A0A1I3IZ96_9GAMM Isochorismate synthase MenF OS=Xenorhabdus mauleonii OX=351675 GN=menF; PE = 3 SV=1
MLLTGKAVNQIANIIANVCESLNAENVSEIGIQSFSFALPAGKSDQWLAWLAAQPHYPQFYWQHREGHEEVIACGKIRLFSNIREAEEFLQRHHQFSQMRLWGLNAWNKVNFYHPYDENAGQGKLEDAMCGESFLFLPRFELRRYHDENRLYINIDGKTDIENACQFLSQFLPHETLYPLQTAILQARHTPEHGRWNILLGQALDAITQNKMEKVVMARKTELILNSSLPPAQFMAASRQVNHHCYHFMLAFDAERAFMASTPERLYYRNQLQLYTEALAGTVANAEDAQEAAELAQWLLGDKKNQHENLIVVDDICQRLQGGVTSIDVGLPDVIRLRKVQHLRRHIRGVLKQVSDSDCLRRLQPTAAVAGLPREAARQFLTENEPFNREWYAGSAGYLCLEQSEFAVSLRCAQIHDNKLSLYAGAGIVADSDPEQEWIEIENKAAGLRTLLINLIDE

SEQ ID NO: 95189 - protein, 458 aa, Xenorhabdus miraniensis
  REGION 1..458: note = tr|A0A2D0JUE1|A0A2D0JUE1_9GAMM Isochorismate synthase MenF OS=Xenorhabdus miraniensis OX=351674 GN=menF; PE = 3 SV=1
MNQTADVIAGVCEYLNAGNVSETGIQSFSFTLPAGSSVHWLAWLSVQPHYPQFYWQHRDGHEEVVACGKIRSFSNIAGAEKFLQQYHPVSQMRLWGLNAWDKMDSEHCHHSYFCHDNVWQGKCENQDHHENIAGGESYLFLPRLELRRHRGENRLYINVDGRADIKNACRFLRQLLPHQPFLPLQTTILKAKHVPESEQWNILLKQALEAITKSKMEKVVIARKTELTLNSPLQAAQFMAASRGVNHRCYHFMLAFSANHAFLASTPERLYYRNQLQFCTEALAGTVANSEDDQEAAKLAQWLLEDKKNQHENLIVVDDICQRLQGGVALVDVTPPDVIRLRKVQHLRRHIRGVLSHVCDSDCLRRLQPTAAVAGLPREAARQFLSDNEPFNRGWYAGSAGYLCLEQSEFAVSLRCAHIYDNLLSLYAGAGIVAGSDPEQEWIEIENKAAGLRTLLVN

SEQ ID NO: 95190 - protein, 447 aa, Xenorhabdus nematophila
  REGION 1..447: note = tr|A0A0A8NXW0|A0A0A8NXW0_XENNE Isochorismate synthase MenF OS=Xenorhabdus nematophila str. Websteri; OX = 1437826 GN=menF PE=3 SV=1
MSQIANIIADVCEFLSTEEVSEIGIQSFSFVLPANNGIHWLEWLSVQPHYPQFYWQHRDDHEEVVACGLIRQFNHIVEAEIFLQQHSQFPQMRLWGLNAWDKVNFYHFHHENSATDKHKNITSKDSYLFLPRLELRRHRGENRLYINIDGKADIENACRFLRQLLPHQSLLPLQTAILDTRHMPEYEQWNILLGQALDAITQRKLEKVVIARKTELTLNSPLQAAQFMAASSRVNHRCYHFMLAFSANHAFLASTPERLYYRNQLQFYTEALAGTVANSEDAYKATELAQWLLEDKKNQHENLIVVDDICQRLQGGVTLVDVALPDVIRLRKVQHLRRHIRGILNKVCDSDCLRRLQPTAAVAGLPREAARQFLADNEPFDRGWYAGSAGYLCLEQSEFAVSLRCAHIHDNLLSLYAGAGIVAGSDPEQEWIEIENKAAGLRTLLVS

SEQ ID NO: 95191 - protein, 389 aa, Xenorhabdus poinarii
  REGION 1..389: note = tr|A0A068R0G6|A0A068R0G6_9GAMM Isochorismate synthase entC OS=Xenorhabdus poinarii G6 OX=1354304; GN = entC PE=4 SV=1
MSGIVNDLLPLTLQEDDFIFLSPHKSLLARGCLATLTHPASSGHHVESEFQQSVQQLLRQTQQAGVENPIIVGAIPFDKRQPCSLFIPQTCYWFDRHAFNLSDSPVQVEGQAHFIPDHDAFCAMVESALNPLRIGELDKVVLSRLLQIESIPPLSALNLWLQLSRQNPESYNFHLPLADGTLIGASPELLLRKEGNVLRSCPLAGSVRRGDNTASDRNAKEKLLASGKDRHEHRVVTEVIRRQLTDLCRSLTIPEPSLLSTPALWHLATEIQGILADDRNSALSLACLLHPTPALCGAPYTSSRNLIGALEPFDRGWFGGIVGWCDARGDGEWVVAIRCGKVRPHQIELFAGAGIVPDSVPENEWMETHTKFNTMLSALGFAMQQEQTL

SEQ ID NO: 95192 - protein, 436 aa, Xenorhabdus sp.
  REGION 1..436: note = tr|A0A2D0LA91|A0A2D0LA91_9GAMM Isochorismate synthase MenF OS=Xenorhabdus sp. KJ12.1 OX=1851571 GN=menF; PE = 3 SV=1
MDQIASIIANVCETLRTKNVSEVGIQSFSFPLSVTDDTDWLEWLAAQPHYPQFYWQHRDGHEEVVACGQIRLFRDATQAENFLNQHAQFPQMRIWGLNAWEREENTDNEESYLFLPRIEIRRCHKATYLYLNIDGQADIDNIYVFLRKIAPHQPFQSSRVTILNTTHRPESEQWNTLLEQALDAITRKKMEKVVMARKTELMLDMPLQAGQFMAASREVNHHCYHFMLAFSDTQAFLASTPERLYYRHQLQLFTEALAGTTINSDDDQKAKELGQWLLKDKKNQHENLIVVDDICQRLQGGVTAIDVAPPDVIRLRKVQHLRRHINGFLNQVSDSDCLSRLQPTAAVAGLPREAARQFLAENEPFRRGWYAGSAGYLGLEQSEFAVSLRCAYIDGALLSLYAGAGIVSGSDPEQEWIEIENKAAGLRSLLSNLSME

SEQ ID NO: 95193 - protein, 436 aa, Xenorhabdus stockiae
  REGION 1..436: note = tr|A0A2D0KWD3|A0A2D0KWD3_9GAMM Isochorismate synthase MenF OS=Xenorhabdus stockiae OX=351614 GN=menF; PE = 3 SV=1
MDQIASIIANVCETLRTKNVSEVGIQSFSFPLSVTDDTDWLEWLAAQPHYPQFYWQHRDGHEEVVACGQIRLFRDATQAENFLNQHAQFPQMRIWGLNAWEKEENTDNEESYLFLPRIEIRRCHKATYLYLNIDGQADIDNIYAFLRKIAPHQPFQSSRVTILNTTHRPESEQWNTLMEQALDAITRKKMEKVVMARKTELMLDMPLQAGQFMAASREVNHHCYHFMLAFSDTQAFLASTPERLYYRHQLQLFTEALAGTTINSDDDQKAKELGQWLLKDKKNQHENLIVVDDICQRLQGGVTAIDVAPPDVIRLRKVQHLRRHINGFLNQVSDSDCLSRLQPTAAVAGLPREAARQFLAENEPFRRGWYAGSAGYLGLEQSEFAVSLRCAYIDGALLSLYAGAGIVSGSDPEQEWIEIENKAAGLRSLLSNLSME

SEQ ID NO: 95194 - protein, 441 aa, Xenorhabdus szentirmaii
  REGION 1..441: note = tr|W1ITG5|W1ITG5_9GAMM Isochorismate synthase MenF; OS = Xenorhabdus szentirmaii DSM 16338 OX=1427518 GN=menF; PE = 3 SV=1
MNHIAGIIANVCEYLNRENISEVGIQSFSFALPAGNNAHWLEWLATQQHYPQFYWQHRDGHEEVVACGKIRLFSNVTDAEQFLRQHGQFPQMRMWGLNAWDKVVMAQHGDVIGGESYLFLPRLEMRRHQGENRLYINIDGKADIENACQFLNQLLPPDSFLPLQTAILKATHIPESAQWNILLKTALDAIEQNKMEKVVMARKSELRLNSPLQAAQFMATSRQVNHRCYHFMLAFGPYHAFVASTPERLYHRKKLQFYTEALAGTVVNSEDDHQAEALAKWLLEDKKNQHENLIVVDDICQRLQGGVSRVDVSPPDVIRLRKVQHLRRPIHGVLTQACDSDCLRRLQPTAAVAGLPRDAARQFLAEHEPFNREWYAGSAGYLCLEESEFAVSLRCAHINNDLLSLYAGAGIVSGSDPEQEWIEIENKAAGLRTLLTNRIDE

SEQ ID NO: 95195 - protein, 380 aa, unidentified
  source 1..380: note = Xinfangfangia sp.
  REGION 1..380: note = tr|A0A3P5XST0|A0A3P5XST0_9RHOB Isochorismate synthase DhbC OS=Xinfangfangia sp. CIP 111625 OX=2483812; GN = dhbC PE=4 SV=1
MTLLSAQSLAARLPDFLIAGPGHALAWEGVRRRLAAGPLASLAARAADFFAAGHDGPQRLVGAVPFDPQAADALFQPAREGTVPAGAPGARGPALLPVQVRHEPPAAAFRAAVARATERIGAGEFDKIVLSRSLHLAASGDEEAGNLLARLRADTLATVFSVPLPGGRHLIGATPELLLERRGAQVFSHPLAGSARRSADPRADRAAAAALLGSDKDRREHGMAAEMVLDTLAPFCRRIAAEETRPVPTARMWHLGTRIAGELRDPDTPCAALLAALHPTPAVCGLPRAPALAALPGLEGYDRGFYAGAVGWLEASGDGCWYLALRCAELSATGARLYAGAGVVAGSDPAAEEAETSAKFLAMLAAFGIDESGNPMSPEE

SEQ ID NO: 95196 - protein, 472 aa, Xylanibacterium sp.
  REGION 1..472: note = tr|A0A4P6ENQ2|A0A4P6ENQ2_9MICO Isochorismate synthase OS=Xylanibacterium sp. 2JSPR-7 OX=2509459; GN = ET495_15270 PE=4 SV=1
MSASTFPHPAGRPGRRSGSTSPLPEAQPLVVRTAALDLPDDGLTTLVDLLPASGLPLRAAAGADRAGGAPLAWVRRGDGIVGWGEALRVDTRGAERFAAAEAAWQAVLDRAVVRDDVRLPGTGPVAFGSFAFDAESAEGGVLVVPRVVVGRRGGQAWITTISATLDAAPTAALLDPARREPVASPGTVTESDGAVDATGWPGIVADAVARIQAGRLEKVVLARDVVATAEHPLDPRWMLRRLARAYEATWAFSVAGMVGATPELLVRSEKGLVASRVLAGTIRREPGMTDDDALLRAAHLARSSKDLEEHEHAVVSVARALEPFCTSMNVPEQPFVLHLPNVMHLASDVTGVLDRAAGTSGGTPGGPPSSLTLAAALHPSAAVCGTPTAPARELIRELEGMDRGRYAGPVGWMGGDGDGEWGIALRSARLDDADPHRVRLFAGCGVVAASDPAAELAESEAKLVPMRWALGS

SEQ ID NO: 95197 - protein, 451 aa, Xylanimicrobium sp.
  REGION 1..451: note = tr|A0A4P6F2Y2|A0A4P6F2Y2_9MICO Isochorismate synthase OS=Xylanimicrobium sp. FW10M-9 OX=2509457; GN = ET471_07725 PE=4 SV=1
MSATAVPPPAGRPAGRRDDVAPGSQTRPLVVRTAAIDLPDGGLTTLVDLLPDAKPLAWVRRGDGIVGWGEALRVTTGGETRFADADAAWQAVLERAVVRDDVRLPGTGPVAFGSFAFDATSADGGVLVVPRVVVGRRGDRAWITTISSGLGAAPTTALLDPAHRTPVTGPGAVTEADGAVAAADWPAIVADAVARIQAGRLEKVVLARDVVATTGRALDPRWLLGRLAAAYETTWTFSVGGMVGATPELLVRSEKGLVASRVLAGTIRREPGMTDDDALLRAAHLARSSKDLEEHEHAVVSVARALEPFCTSMNVPEQPFVLHLPNVMHLASDVTGVLDRPADRPGPSSLALAAALHPSAAVCGTPTAPARELIRQIEGMDRGRYAGPVGWTGSDGDGEWGIALRSARLDDTDPRRVRLFAGCGVVAASDPAAELAESEAKLVPMRWALRG

SEQ ID NO: 95198 - protein, 451 aa, Yersinia aldovae
  REGION 1..451: note = tr|A0A0T9U8Y8|A0A0T9U8Y8_YERAL Isochorismate synthase MenF OS=Yersinia aldovae OX=29483 GN=menF PE=3; SV = 1
MKQLSGLLGELRQKLRAGFPDQAGIRQIIVPAPGRIGSQLLEWLAAQCHFPQFYWRHREGHEEAAVCGQTQIFNDMQSADDFIQQNQDAGGLRIWGLNAFEPVIVHGHNDAEQPVQPSFLFLPRIEILRRGEQTYLTLNLTSDFSLHQDALRAMTFIDQLVAAKPLAAFDVQVRHASHMPEYPQWSRLIQHALDDIEQQKMEKVVLARTTQLTLDKPLSCGAFMAASRRVNHHCFHFMLRFDAQRAFLGSSPERLYLRQQLHLETEALAGTVSNAPSHQQAAELADWLMHDEKNQRENLLVVDDICQRLQGGVAAVDVMPPEIIRLRKVQHLRRCIHAQLNHASDTDCLQRLQPTAAVAGLPRNVARQFITEHEPISRGWYAGSAGYLSLKQTEFSVTLRSAWVEDQKVHLYAGAGIVAGSDAEQEWQEINNKSAGLRTLLGSQQQDSKTP

SEQ ID NO: 95199 - protein, 460 aa, Yersinia bercovieri
  REGION 1..460: note = tr|A0A2G4TYF0|A0A2G4TYF0_YERBE Isochorismate synthase MenF OS=Yersinia bercovieri OX=634 GN=menF PE=3; SV = 1
MKQLSGLLGELRQKLRAGFPDQAGIRQIILPASGQVGSQLLEWLAAQCHFPQFYWHHREGHEEAAVCGQTRQFNDVQSADAFIQQHELIKQNSDATGLRIWGLNAFEPVSLVLPSAVTEACALQQTQTSFLFLPRIEILRRGNRTHVTLNLVSDCSLQQDALLAIAFIDQLVAAKPLPALDVQVQHASHVPEYPQWRSLIQQALSSIEQQAMEKVVLARATRLTLDKPLSCCAFMAASRQVNHHCFHFMLRFDTQRAFLGSSPERLYLRQKWHLETEALAGTTSNDDDHQQAMALADWLMGDEKNQRENLLVVDDICQRLQGGVVAVDVMPPEIIRLRKVQHLRRRIHAQLNRASDTDCLQRLQPTAAVAGLPRNIARQFIAENEPFSRGWYAGSAGYLSRQQSEFSVTLRSAWLEDQWVNLYAGAGIVAGSDPELEWQEINHKSAGLRTLLDSQQESKT

SEQ ID NO: 95200 - protein, 454 aa, Yersinia enterocolitica
  REGION 1..454: note = tr|A0A2R9TE39|A0A2R9TE39_YEREN Isochorismate synthase MenF OS=Yersinia enterocolitica subsp. palearctica YE-P4 OX=1329364 GN=menF PE=3 SV=1
MKQLSGLLGELRQKLRANFPDQAGIRQIILPAPGQVGNQLLEWLSAQYHFPQFYWCHREGHEEAAVCGQTRQFNDVQSADQFIQQHRAVAGLRVWGLNAFEPVSIVEPSPDSSQQTQTSFLFLPRIEILRRGKNTYLTLNLVSDDSLAQDALLAIAFIDQLVAAKPLPAVDVVVEAASHMPEYPQWSRLIEQALGNIEQQKMEKVVLARTTRLMLDKPLLCGAFMAASRQVNHHCFHFMLRFDGLRAFLGSSPERLYLRQFQHLETEALAGTASNDDDTAQAAELADWLMHDEKNQRENLLVVDDICQRLQGGVAAVDVMPPEVIRLRKVQHLRRCIHAQLNHANDADCLHRLQPTAAVAGLPRNVARQFITENEPFSRGWYAGSAGYLSLKQTEFSVTLRSAWVEDKQIHLYAGAGIVAGSDAEQEWQEINNKSAGLRTLLVNIKSDNNHKMQ

SEQ ID NO: 95201 - protein, 441 aa, Yersinia entomophaga
  REGION 1..441: note = tr|A0A3S6F465|A0A3S6F465_YERET Isochorismate synthase MenF OS=Yersinia entomophaga OX=935293 GN=menF; PE = 3 SV=1
MTQLSDLLEELRHLLDADFPDRAGVRQIALPAPAVLGSQLLEWLATQPVFPQFYWRHRDGHEEAAVCGQVRLFRDMSAADEFIRQYKNHAGLRIWGLNAFEPFPAIANETDISSAFFFLPRLQLLRRGGEISLTLNLASETSLQQDVCLALDFIEQLLAPRPIPELTVSVETLVHQPDQKGWCQLLEQALRAIANQQMEKVVLARMTHLTLRETLFSPAFMAASRQVNHQCFHFMLRFDDRRAFLGSSPERLYRRQQSQLETEALAGTVANDKDDAKAACLAHWLAGDDKNQRENLLVVDDICQRLQGGVSAVDVMPAEVIRLRKVQHLRRRIRAQLQPNVTDADCLQRLQPTAAVAGLPREPARLFILDAEPFSRGWYAGSSGYFSLAQSEFAVALRSAQIEGDQVQIYAGAGIVAGSDPLMEWQEIENKSAGLRSLLEK

SEQ ID NO: 95202 - protein, 441 aa, Yersinia frederiksenii
  REGION 1..441: note = tr|A0A0B6FNB3|A0A0B6FNB3_YERFR Salicylate synthase; OS = Yersinia frederiksenii Y225 OX=1454377 GN=AW19_780 PE=4; SV = 1
MTDTRSELRLNLPAERTLAAIVSLIRQNPTEDYYVYERPPCWYVGLGKRASLTLSSDGSQAITESEEGCRTAPVTSSLAHYARQFRAQHAGAGQRVFGMAGFNYAACIRGIAFPPGEWPLLSLLVPRDELVFDAGEVTILAHSADQCRHLARQLQDISPAPAGGALLADLTAQGKDYQHQVTRALEEIAAGEYTKVIVSRALALAERIDMPATLWRGRMSNTPARSFLLQQGAFAATGFSPEMVVTVEQDIVTSEPLAGTRALSGSAGEDADNRAELQSDSKEIVEHVISVKAAIGELETLCVRDSVAVTDLMSVRERGSVQHLGSQVCGKLASGRDAWDAFDVLFPAITASGIPKLPALAAILRLEAVPRELYSGAILMLEGERSFEAALVLRSAFQDARRSWIQAGAGVIAQSNALRELTETCEKLSSVAPYLVVSQAK

SEQ ID NO: 95203 - protein, 392 aa, unidentified
  source 1..392: note = Yersinia hibernica
  REGION 1..392: note = tr|A0A481QKL2|A0A481QKL2_9GAMM Isochorismate synthase OS=Yersinia hibernica OX=2339259 GN=D5F51_19185; PE = 4 SV=1
MPINSPFSAVPSTFLFTSRHQSIKTQGIFERITQAAQDRAGHDNSLQSALQAALSRARDAGQQQPIIVGAIPFDTRQPSCLFIPESYQVCDRQTLVNAARVKSGRAVTSRAIRSLPDENEFKHIVAEAVAACQRGVIHKVVLSRILEIDTDTPVDSDQVMNQLLIQNHTAHHFRVPLADGGVLLGASPELLVRKHLAGVYTNPLAGSAKRQIDPQHDVDISLALLDSEKDQYEHRLVIDEIRRLLTPYCTHLHIPAQPSLINTAALWHLSSAISGELENPQTRVLELANLLHPTPALCGLPTQKARRLIQQLEPFERGLFSGIVGWCDEQGNGEWAVIIRCATVHPTQVRLFAGAGIVDASQPAAEWAETEAKLGTMLNAIAITPQERCYEY

SEQ ID NO: 95204 - protein, 444 aa, Yersinia intermedia
  REGION 1..444: note = tr|A0A208ZIT3|A0A208ZIT3_YERIN Isochorismate synthase MenF OS=Yersinia intermedia OX=631 GN=menF PE=3; SV = 1
MKQLSGLLGELRQKLRAGFPDQAGIRQIIVPVSGRIGSQLLEWLAAQCHFPQFYWLHREGHEEAAACGQTRLFNDMQAADHFIQQHRDASGLRIWGLNAFEPVIVNQHADGAPQAQASFLFLPRIEILRRGEQTYLTLNLASDFSLQQDALLAITFIDQLVAAKSLPALDAQVQHAHHMPEYPQWSHLIQHALDEIAQQKMEKVVLARATQLTLDKPLSCAAFMAASRQVNHHCFHFMLRFDARRSFLGSSPERLYLRQQLHLETEALAGTVSSADSPQQAAELADWLMHDEKNQRENLLVVDDICQRLQGGVAAVDVMPPEIIRLRKVQHLRRCIHAQLTRASDTDCLQRLQPTAAVAGLPRNVARQFIARYEPFPRGWYAGSAGYLSAKQTEFSVALRSAWVEDQQVHLYAGAGIVAGSDPEQEWQEINNKSAGLRTLLGSQ

SEQ ID NO: 95205 - protein, 464 aa, Yersinia kristensenii
  REGION 1..464: note = tr|A0A0T9N8C4|A0A0T9N8C4_YERKR Isochorismate synthase MenF OS=Yersinia kristensenii OX=28152 GN=menF; PE = 3 SV=1
MKQLSGLLGELRQKLRAGFPDQAGIRQIILPAPGQVGNQLLEWLAAQGHFPQFYWHHRDGHEEAAVCGQTRQFNDVASADQFIQQHSAVAGLRIWGLNAFEPVTIIVEATNIAETANIATPAAEAPQQTQTSFLFLPRIEILRRGNNTHLTLNLVSDYSLAQDALLAIAFIDQLVIAKPLPALDVVVENASHMPEYPQWSRLIQQALGNIEQQKMEKVVLARATRLRLDKPLSCAAFMAASRQVNHHCFHFMLRFDGSRAFLGSSPERLYLRQLQHLETEALAGTTSNDNDTAQATALADWLMHDEKNQRENLLVVDDICQRLQGGVVAVDVMPPEIIRLRKVQHLRRRIHAQLNRANDADCLYRLQPTAAVAGLPRNVARQFISENEPFSRGWYAGSAGYLSLKQTEFTVTLRSAWLDDSQIHLYAGAGIVAGSDAEQEWQEINNKLAGLHTLLTNENYNPKM

SEQ ID NO: 95206 - protein, 470 aa, Yersinia massiliensis
  REGION 1..470: note = tr|A0A0T9PDJ8|A0A0T9PDJ8_9GAMM Isochorismate synthase MenF OS=Yersinia massiliensis OX=419257 GN=menF; PE = 3 SV=1
MKQLSGLLGELRQKLRAGFPEQAGIRQIILPASGQVGSQLLEWLAAQCHFPQFYWHHRDGHEEAAVCGQTRQFNDMQSADEFIQQHQLTKLNSETTGLRIWGLNAYEPVSVVDAAADSKTCATHSAQSTCSTQSTQTSFLFLPRIEILRRGNHTHVTLNLVSDFSLQQDALLAIAFIDQLVTAKPLPALDVHVQQASHMPEYPQWRDLIEQALGSIEQQTMEKVVLARATRLMLDKPLSCSAFMAASRQVNHHCFHYMLRFDASKAFLGSSPERLYLRQKWHLETEALAGTASNDDDHQQARVLSDWLMQDEKNQRENLLVVDDICQRLQGGVAAVDVMPPEIIRLRKVQHLRRRIHAKLNRASDTDCLQRLQPTAAVAGLPRNVARQFIAQNEPFSRGWYAGSAGYLSLQQSEFSVTLRSAWVEDQRINLYAGAGIVAGSDPELEWQEINHKSAGLRTLLDSHSQDNKS

SEQ ID NO: 95207 - protein, 461 aa, Yersinia mollaretii
  REGION 1..461: note = tr|A0A0U1I9C4|A0A0U1I9C4_YERMO Isochorismate synthase MenF OS=Yersinia mollaretii OX=33060 GN=menF PE=3; SV = 1
MKQLSGLLGELRQKLRAGFPDQAGIRQIILPASGQVGSQLLEWLAAQCHFPQFYWHHREGHEEAAVCGQARQFNDVQSADAFIQQHELIKQNSDATGLRIWGLNAFEPVSLVVPSADTAVCAVQQTQTSFLFLPRIEILRRGHQTYVTLNLVSDFSLQQDALLAIAFIDQLVAAKPLPALDVQVQNASHMPDYPQWSRLIQQALGNIEQQTMEKVVLARATRLTLDKPLSCSAFMAASRQVNHHCYHFMLRFDALRAFLGSSPERLYLRQKWHLETEALAGTTSNDDDHQQARVLADWLMQDEKNQRENLLVVDDICQRLQGGVAAVDVMPPEIIRLRKVQHLRRRIHAQLNRANDTECLQRLQPTAAVAGLPRNVARQFIAENEPFPRGWYAGSAGYLSRQQSEFSVTLRSAWVEDHWVNLYAGAGIVAGSDPELEWQEINHKSAGLRTLLEPHPQESNR

SEQ ID NO: 95208 - protein, 441 aa, Yersinia nurmii
  REGION 1..441: note = tr|A0A0T9KMJ9|A0A0T9KMJ9_9GAMM Isochorismate synthase MenF OS=Yersinia nurmii OX=685706 GN=menF PE=3; SV = 1
MTQLSDLLEELRHLLDADFPDRAGVRQIALAVPAVLGVQLLEWLATQPVFPQFYWRHRDGHEEAAVCGQVRLFRDMSAADEFIRQYKNHTGLRIWGLNAFEPFPAIANETDISSAFLFLPRVQLLRRGGEIILTLNLASETSLRQDVCRALDFIEQLLTPRPIPELAVSVETLVHQPDQNGWYQLLEQALRAIANQQMEKVVLARMTRLTLRETLFSPAFMAASRQVNHQCFHFMLRFDDRRAFLGSSPERLYRRQQSQLETEALAGTVANDKDDAKAARLAHWLADDDKNQRENLLVVDDICQRLQGGVSAVDVMPAEVIRLRKVQHLRRRIRAQLQPNVADADCLQRLQPTAAVAGLPRKPARLFILAEEPFSRGWYAGSAGYFSLAQSEFAVALRSAQIEGNQVQIYAGAGIVAGSDPLMEWQEIENKSAGLRSLLEK

SEQ ID NO: 95209 - protein, 451 aa, Yersinia pekkanenii
  REGION 1..451: note = tr|A0A0T9PRW4|A0A0T9PRW4_9GAMM Isochorismate synthase MenF OS=Yersinia pekkanenii OX=1288385 GN=menF; PE = 3 SV=1
MKQLSGLLGELRQKLRAGFPDQAGIRQIIVPAPGRIGSQLLEWLAAQCHFPQFYWRHREGHEEAAVCGQTWLFTDMQSADHFIQQHRDLSGLRIWGLNAFEPVMVDGYRNAEQPVQASFLFLPRIEILRRGEQTYLTLNLASDLSLHQDALRAIIFIDQLVAARPLPELDVCVQHASHLPEYPQWCHLIQRALDDIGQQKMEKVVLARTTRLTLDKPLSCGAFMAASRQVNHHCFHFMLRFDARRAFLGSSPERLYLRQQLHLETEALAGTVSNAESQQQASELADWLMHDEKNQRENLLVVDDICQRLQGGVAAVDVMPPEIIRLRKVQHLRRCIHAQLSRVSDTDCLQRLQPTAAVAGLPRNVARQFIAEYEPFSRGWYAGSAGYLSAKQTEFSVALRSAWLEEQQIHLYAGAGIVAGSDAEQEWQEINNKAAGLRTLLGSRQQNNKIQ

SEQ ID NO: 95210 - protein, 455 aa, Yersinia pestis
  REGION 1..455: note = tr|Q0WDZ8|Q0WDZ8_YERPE Isochorismate synthase MenF; OS = Yersinia pestis OX=632 GN=menF PE=3 SV=1
MKQLSGLLGELRQKLCAGFPEQAGIQQLIFPAPGLVGRQLLEWLTAQTHFPQFYWRHRDNHEEAAVCGQTRSFADMKDADDFIQQNPDANGLRIWGLNAFEPVMVFGQLTDNGLVSGKNAQASFLFLPRLEILRRGKKTSLTLNLSSETSLQKDALQAITFIDQLMAARALPVLNARIQHSSHTPGYPQWRNLIQQALNDIEQQKLDKVVLARTTTLTLNKPLSCAAFMAASRQVNHRCYHFMLRFDDRQAFLGSSPERLYLRQQLHLETEALAGTVSNLDSDPQAAVLADWLMHDEKNQRENLLVVDDICQRLQGGVTAVDVMPPEIIRLRKVQHLRRRICAQLSRASDTDCLQRLQPTAAVAGLPREAARQFIAKHELFSRGWYAGSAGYLSLKRTEFSVALRSARVDGQQIHLYAGAGIVAGSDAEQEWQEIDNKSAGLQSLLEHEAQPVKA

SEQ ID NO: 95211 - protein, 455 aa, Yersinia pseudotuberculosis
  REGION 1..455: note = tr|A0A0T9JGG5|A0A0T9JGG5_YERPU Isochorismate synthase MenF OS=Yersinia pseudotuberculosis OX=633; GN = menF PE=3 SV=1
MKQLSGLLGELRQKLCAGFPEQAGVQQLILPVPGSVGRQLLEWLTAQAHFPQFYWRHRDNHEEAAVCGQACSFADVKSADDFIQQNPDANGLRIWGLNAFEPVMVFGQPTDNGLASGQNPQTSFLFLPRIEILRRGEQTSLTLNLSSDTSLQKDALRAITFIDQLMAARSLPVLNARIRHASHTPGYPQWRNLIQQALNDIEQQKLDKVVLARTTTLTLNKPLSCAAFMAASRQVNHRCYHFMLRFDDRQAFLGSSPERLYLRQQLHLETEALAGTVSNIASDPQAAILADWLMHDEKNQRENLLVVDDICQRLQGGVTAVDVMPPEIIRLRKVQHLRRRICAQLSRASDTDCLQRLQPTAAVAGLPREAARQFIAKHEPFSRGWYAGSAGYLSLKRTEFSVALRSARVDGQQIHLYAGAGIVAGSDAEQEWQEIDNKSAGLQSLLEHEAQPVKA

SEQ ID NO: 95212 - protein, 451 aa, Yersinia rohdei
  REGION 1..451: note = tr|A0A0U1HVY0|A0A0U1HVY0_YERRO Isochorismate synthase MenF OS=Yersinia rohdei OX=29485 GN=menF PE=3 SV=1
MKQLSGLLGELRQKLRAGFPEQAGIRQIILPAPGLVGSQLLEWLAVQCHFPQFYWQHREGHEETAVCGQIRQFNDVASAERFIQQHSAVAGLRVWGLNAFEPVSITDPSASSPPQLQTSFLFLPRIEISRRGHHTHLTLNLVSDFSLQQDAALAITFIDQLVAAKPLPALDAVVEHASHMPEYPQWSGLIQRALGNIEQQKMEKVVLARATRLMLDKPLSCTAFMAASRQVNHHCYHYMLRFDAVRAFLGSSPERLFQRQLLHLETEALAGTVSNDENSVQATELANWLMHDEKNQRENLLVVDDICQRLQGGVEAVDVMPPEVIRLRKVQHLRRRIHARLNLASDTDCLQRLQPTAAVAGLPRNIARQFIAENEPFSRGWYAGSAGYLSLKQTEFSVTLRSAWVEDSQIHLYAGAGIVAGSDPQQEWQEINNKSAGLRTLLTNQQQDNKA

SEQ ID NO: 95213 - protein, 398 aa, Yersinia ruckeri
  REGION 1..398: note = tr|A0A0A8VG89|A0A0A8VG89_YERRU Isochorismate synthase of siderophore biosynthesis OS=Yersinia ruckeri; OX = 29486 GN=entC PE=4 SV=1
MAQSGTEEHLVNPLFSATSSAFLFTSAHRSIKTEGIAERITQKAQDGADYLSALQASIKQAFIRARADGQSQPIVVGVFPFDTTQATQLFIPQSYQFIHRQDLVDCAVNDQRSPISVVNWRSLPNEPEFKQAVSRAVETFRRGKIHKAVLSRILEIETETPINTNQVINHLLRQNPGAYHFHVPLAEGGVLLGASPELLVRKDGNQVYTNPLAGSAKRQNDVENDLAVSQALLNSGKDQYEHRLVIDEIRRLLAPYCRSLNIPTQPSLIHTAALWHLSTAISGELETSQISVLQLACLLHPTPALCGLPTALARQLISQLEPFDRGLFSGIVGWSDEQGNGEWAVVIRCATVDKTQVRLFAGAGIVMASQPALEWAETEAKLGTMLNALGIQPQGSLP

SEQ ID NO: 95214 - protein, 455 aa, Yersinia similis
  REGION 1..455: note = tr|A0A0T9Q3L5|A0A0T9Q3L5_9GAMM Isochorismate synthase MenF OS=Yersinia similis OX=367190 GN=menF PE=3; SV = 1
MKQLSGLLGELRQKLCASFPEQAGIQQLILPAPGSVGRQLLEWLTAQAHFPQFYWRHRDNHEEAAVCGQTRSFADVKDADDFIQQNPDANGLRIWGLNAFEPVMAFGQPTNNGLVCGQNPQASFLFLPRIEILRRGEQTSLTLNLSSDTSLQKDALRAIEFIDQLMAARALPVLNARIQHASHTPEYPQWRNLIQQALNDIEQQKLDKVVLARTTALTLNKPLSCAAFMAASRQVNHRCYHFMLRFDDRQAFLGSSPERLYLRQQLHLETEALAGTVSNIDSDPQAAVLADWLMHDEKNQRENLLVVDDICQRLQGGVTAVDVMPPEIIRLRKVQHLRRRICAQLSRASDTDCLQRLQPTAAVAGLPREAARQFIAKHEPFSRGWYAGSAGYLSLKHTEFSVALRSARVDGQQIHLYAGAGIVAGSDAEQEWQEIDNKSAGLQSLLEHEAQPVKA

SEQ ID NO: 95215 - protein, 455 aa, unidentified
  source 1..455: note = Yersinia wautersii
  REGION 1..455: note = tr|A0A0E8XJB3|A0A0E8XJB3_9GAMM Isochorismate synthase MenF OS=Yersinia wautersii OX=1341643 GN=menF; PE = 3 SV=1
MKQLSGLLGELRQKLCAGFPEQAGVQQLILPVPGSVGRQLLEWLTAQAHFPQFYWRHRDNHEEAAVCGQACSFADVKSADDFIQQNPDANGLRIWGLNAFEPVMVFGQPTDNGLASGQNPQTSFLFLPRIEILRRGEQTSLTLNLSSETSLQKDALRAITFIDQLMAARSLPVLNARIQHASHTPGYPQWRNLIQQALNDIEQQKLDKVVLARTTTLTLNKPLSCAAFMAASRQVNHRCYHFMLRFDDRQAFLGSSPERLYLRQQLHLETEALAGTVSNLDSDPQAAVLADWLMHDEKNQRENLLVVDDICQRLQGGVTAVDVMPPEIIRLRKVQHLRRRICAQLSRASDTDCLQRLQPTAAVAGLPREAARQFIAKHELFSRGWYAGSAGYLSLKRTEFSVALRSARVDGQQIHLYAGAGIVAGSDAEQEWQEIDNKSAGLQSLLEHEAQPVKA

SEQ ID NO: 95216 - protein, 436 aa, unidentified
  source 1..436: note = Yersiniaceae bacterium
  REGION 1..436: note = tr|A0A2N5E1Y5|A0A2N5E1Y5_9GAMM Isochorismate synthase MenF OS=Yersiniaceae bacterium 2016Iso4; OX = 2060068 GN=menF PE=3 SV=1
MMQALEQTLQDETLCRASGVRQLILTFYHPENRHPESAPLLGWLAAQPHFPKFYWQPRDGTETVAVCGQVAQFSDAQQAGQFLHHHAGHAGRLRVWGLNAFEAAPQPACLFVPRLTLHQQANTLTLTLNLADPHALQGDLVRAAAFLQQLQPATLLPPQPLSLTHASHQPDEAGWHALLQHALAGIAAGEMEKVVLARKTVLTFSQPVDAWRMLAASRQVNHHCYHFLMAFSPTAAFLSASPERLFLRQGDQLTTEALAGTVASSEDDHQAAVLAGWLMKSEKNQRENWLVVDDICRQLQGAAHGLDVMPPEIVRLRKVQHLRRTIHGQIRAADDALCLARLQPTAAVAGLPRLPARRFILSHEPFPRGWYAGSAGYLSREQSEFAVSLRSAWLEEHQVHLYAGAGIVAGSDPAQEWQEIENKAAGLRTLLEDPAE

SEQ ID NO: 95217 - protein, 426 aa, Yimella sp.
  REGION 1..426: note = tr|A0A4Q3XQL3|A0A4Q3XQL3_9MICO Isochorismate synthase OS=Yimella sp. RIT 621 OX=2510323 GN=EU513_07355; PE = 4 SV=1
MTFPLADATPPTLVARTTQIPDPIDLSLLVPDDVAPQDIVCWLRGGEGLIGWGRAASITTSGADRFDAATQWWQDVTASAVVRTDLDLPGTGPIAFGTFAFSRRSGQTSTLVVPEVVVGRREGRCWITQIATADRLPGTPARVERHEPRTTGETAFESGSLSRDEWADAVAESVQRIQHGDLDKVVMARDVVARSATPIDPRRLLHRLSQTYSNTWTFAVDGMLGATPEMLLRREKGLVTSRVLAGTIRRSGDDEHDLGLAAGLARSSKDLEEHEYAVRSVAEALRPHCKSMNVPESPFVLHLPNVMHLATDVTGVLRNGTPSLALAAALHPSAAVCGTPTGMAAEVIHELERMDRGRYAGPVGWLDADGDGEWGIALRSGMLDPEDPCRIRLFAGCGIVAGSIPEAELAESDAKLLPMRSALADD

SEQ ID NO: 95218 - protein, 391 aa, Yokenella regensburgei
  REGION 1..391: note = tr|A0A2X2PV57|A0A2X2PV57_9ENTR Isochorismate synthase entC OS=Yokenella regensburgei OX=158877 GN=entC; PE = 4 SV=1
METSLAEDVLDETTTLSPDSFFFMSPYRSFTTSGCFSRVSTPVEGGDDLNSAFQQSISTAFREAKAAGIRKPVMVGAIPFDTTQPSALFIPQQWQTFSRTSRQHAARYAAALPEMNVTERQEIPPQDGFMSMVASAAGLTATPEVDKVVLSRLIEISTDAPLDSGALLERLIAQNPASYNFHIPLPDGGVLLGASPELLLRKEGRHYSSLPLAGSARRQPDDMLDREAGNKLLASEKDRHEHELVTQAMKAVLAPRSKILELPDSPQLVTTPTLWHLATPIEGIAHDEENALSLACLLHPTPALSGFPHQVAKRLISELEPFDRELFGGIVGWCDDEGNGEWVVTIRCARVRENQVRLFAGAGIVPASSPLSEWRETGVKLSTMLNVFGLH

SEQ ID NO: 95219 - protein, 371 aa, Zobellia galactanivorans
  REGION 1..371: note = tr|G0L7M5|G0L7M5_ZOBGA Menaquinone-specific isochorismate synthase OS=Zobellia galactanivorans (strain DSM 12802 / CCUG 47099 / CIP 106680 / NCIMB 13871 / Dsij); OX = 6 3186 GN=menF PE=4 SV=1
MPLDFFDKIDSHLEKELPFVAYRKPNEESVKAIFQNDDGLLHLNDYSETGFVFAPFDSDAPAILLRLDEVLHLDAFPDKTNSPSKNIGEEPGEEQHAFHLDLVKKGIADIKAGKFDKVVLSRSITVKTDTAPLSLFQALLHQYKTAFCYLWYHPKVGMWLGATPEILLTFHNRKLTTMSLAGTQDYTDNVNPTWGNKELEEQQLVTNYILKALEGKVSNLERTPTESVKAGALMHLRTKISGNATQENLGAIINALHPTPAVCGMPKGETKAFILREENYDREFYTGFLGELNFKTERNRNTRPGNTENNVYRSISKNTTLFVNLRCMQRINDTIQIYVGGGITKDSDPEKEWGETVAKSKTMLKVILATE

SEQ ID NO: 95220 - protein, 482 aa, Zooshikella ganghwensis
  REGION 1..482: note = tr|A0A4P9VRH9|A0A4P9VRH9_9GAMM Isochorismate synthase OS=Zooshikella ganghwensis OX=202772; GN = B9G39_15595 PE=4 SV=1
MIDCQTVKGGLAKLEKLVNTYCIKGTSWPIICRVRLPINSDVTQWPSWLAAQSVVPQLFWQQREHKLTVAALGSADTLKDRGLVSQLNARVEQRLACPVIGDGTPKYWGGAGFDQAQTWQDFPGALFFLPSLSLEAQGGQQHLVFQTYLTHAEQWPIKQQALRKLVSCLCWSMQEQASLPRYVHLHDEPNAKRWQQQVRASLAAIKKGQCDKVVLSRRRRLIFNQQVTPWQLLAMWQASQQHLSYPFCLSLRPGEGFVGCSPEQLFSLDNKELTTEALAGSMAKHADPERDIQYSNALFESAKLQQENQWVVKYIQQQLALLVSQQTLGPLSVKTLPYIHHLFQPIKAQLLPSTSVADILTALHPTPAVKGFPANAAEQMISQLETYPRGWYAGVLGFWSRNQAEFCVTIRSAHVHRKANNRCGDKSTQPEQSYHYLVDLFSGAGLVDGSVASQEWQELDQKLSQFMEYMQHAATDNAIAQF

SEQ ID NO: 95221 - protein, 99 aa, unidentified
  source 1..99: note = Acaryochloris sp.
  REGION 1..99: note = tr|A0A2W1JZ52|A0A2W1JZ52_9CYAN Isochorismate pyruvate lyase OS=Acaryochloris sp. RCC1774 OX=1764569; GN = pchB_1 PE=4 SV=1
MVAPHNCENMSDIRAEIDALDRQIIALLGQRFEYVKAAAPFKSSAKDVRAQERFDTMLQQRRIWAETEGLEADVIEKMYRDLVTYFIEAELQHWRSELS

SEQ ID NO: 95222 - protein, 127 aa, unidentified
  source 1..127: note = Achromobacter agilis
  REGION 1..127: note = tr|A0A446CW79|A0A446CW79_9BURK Isochorismate pyruvate lyase OS=Achromobacter agilis OX=1353888 GN=pchB; PE = 4 SV=1
MTNQEPDAQGAPLRAYTDPSYRPLCATLADVRANIDRLDDDIVRLIAERAMYVKDAARFKRDAFQVSAPARQAQVFEKARRLAERHNQGFANLDQVVDATYRAMVAAFIANEQTYFNSMKDLGDTHA

SEQ ID NO: 95223 - protein, 127 aa, Achromobacter sp.
  REGION 1..127: note = tr|A0A446CG62|A0A446CG62_9BURK Isochorismate pyruvate lyase OS=Achromobacter sp. LMG 30378 OX=2069367; GN = pchB PE=4 SV=1
MTNQEPDAQGAPLRAYTDPAYRPLCATLADVRANIDRLDDEIVRLIAERAMYVKDAARFKRDAFQVSAPARQAQVFDKARQLADRHNRGFANLEQVVDATYRAMVAAFIANEQTYFNSMKDLGDTHA

SEQ ID NO: 95224 - protein, 105 aa, Acidithiobacillus thiooxidans
  REGION 1..105: note = tr|A0A543Q1D0|A0A543Q1D0_ACITH Isochorismate pyruvate lyase OS=Acidithiobacillus thiooxidans ATCC 19377; OX = 637390 GN=pchB PE=4 SV=1
MSNVINFTSIEEARSNIDRIDCQIVTLLDERGSFVKQAAQFKKTTDDVKAPQRVEQVIAKVTALSQELGANTSVTEQVYRAMISSFINAELTEYAALNTGETKHY

SEQ ID NO: 95225 - protein, 111 aa, Altererythrobacter sp.
  REGION 1..111: note = tr|A0A369Q4P0|A0A369Q4P0_9SPHN Isochorismate lyase; OS = Altererythrobacter sp. HME9302 OX=2161824 GN=pchB PE=4; SV = 1
MPDNETALTREAAATMPDECMTMAEVRRGVDATDRELFALLERRFGYMRAAARIKQDRGEVRDEARKAAVIAAIREDAVQAGLPARELAEIWEKLVEASIAYEFAEWDRIR

SEQ ID NO: 95226 - protein, 103 aa, unidentified
  source 1..103: note = Unknown
  REGION 1..103: note = tr|A0A5J4DT06|A0A5J4DT06_9BACT Isochorismate pyruvate lyase OS=bacterium MnTg02 OX=2080452 GN=pchB PE=4; SV = 1
MSVCPPQDCRSMDEVRTEIDRIDQALVDLIAERFGYVDRAWQLKDRPDEAVVPWRIQQVIDRVKKRAVEKDLPPELAEAIWRQMIGWFIQYEEVKLNETNGKP

SEQ ID NO: 95227 - protein, 110 aa, Brevibacterium antiquum
  REGION 1..110: note = tr|A0A2H1HT87|A0A2H1HT87_9MICO Isochorismate pyruvate lyase OS=Brevibacterium antiquum CNRZ 918; OX = 1255637 GN=BANT918_00442 PE=4 SV=1
MTELSPPRYNSSMSETRAVDPDLQQVRAKIDSLDRQIIQLIAERQKWVVRASSLKKDESAVRAPDRVEQVITKARTLASDAQASPDVVEATYRAMIDAFISLELDHHRNH

SEQ ID NO: 95228 - protein, 110 aa, Brevibacterium antiquum
  REGION 1..110: note = tr|A0A2H1JRT2|A0A2H1JRT2_9MICO Isochorismate pyruvate lyase OS=Brevibacterium antiquum OX=234835; GN = BANT10_02301 PE=4 SV=1
MTELSPPRYNSSMSETRAVDPDLQQVRAKIDSLDRQIIQLIAERQKWVMRASSLKKDESAVRAPDRVEQVITKARTLASDAQASPDVVEATYRGMIDAFISLELDHHRNH

SEQ ID NO: 95229 - protein, 106 aa, Ensifer sp.
  REGION 1..106: note = tr|A0A395L636|A0A395L636_9RHIZ Isochorismate pyruvate lyase OS=Ensifer sp. M14 OX=2203782 GN=pchB PE=4; SV = 1
MQKTPAECTDMADVRAEIDRLDQALMALFAERWGYIDRAAEIKRPLKLKADIPSRVMEVRENARKNAERRNLDPDFYEEIWARLINHAIAHEQKILGETDGDDQAR

SEQ ID NO: 95230 - protein, 434 aa, Escherichia coli
  REGION 1..434: note = tr|A0A192C8S8|A0A192C8S8_ECOLX Irp OS=Escherichia coli O25b:H4 OX=941280 GN=WLH_00825 PE=4 SV=1
MKISEFLHLALPEEQWLPTISGVLRQFAEEECYVYERQPCWYLGKGCQARLHINADGTQATFIDDAGEQKWAVDSIADCARRFMAHPQVKGRRVYGQVGFNFAAHARGIAFNAGEWPLLTLTVPREELIFEKGNVTVYADSADGCRRLCEWVKEAGTTTQNAPLAVDTALNGEAYKQQVARAVAEIRRGEYVKVIVSRAIPLPSRIDMPATLLYGRQANTPVRSFMFRQEGREALGFSPELVMSVTGNKVVTEPLAGTRDRMGNPEHNKAKEAELLHDSKEVLEHILSVKEAIAELEAVCQPGSVVVEDLMSVRQRGSVQHLGSGVSGQLAENKDAWDAFTVLFPSITASGIPKNAALNAIMQIEKTPRELYSGAILLLDDTRFDAALVLRSVFQDSQRCWIQAGAGIIAQSTPERELTETREKLASIAPYLMV

SEQ ID NO: 95231 - protein, 456 aa, Gordonia rubripertincta
  REGION 1..456: note = tr|A0A222TDW2|A0A222TDW2_GORRU Isochorismate synthase/isochorismate lyase OS=Gordonia rubripertincta; OX = 36822 GN=mbtI PE=4 SV=1
MSLTTDSRTSRIDAAELGLDPAAGLIAPATPLTEAVAARISAAWAGSGEFGDHVVYERNRRWTFAAGVNVRVVVTRGEVIVDDRGRRTTTAWHGDPADALAAATEALPIPDWRLYGWVGFDFCAPYHGILDRVPDDTVLAHLIVPEFEAFVDADGVDTGTADPERARRLLEIAATAGDPGTSRPVDVRVDTEDYRGRVAAAVSEIAAGRYQKVILSRAVDIPFAVDIPATYARGRADNTPARSYLLSLGDLSAAGFSPELVVAVHADRTVVTEPLAGTRAFGVSADQDAAARAELLGDAKEVAEHAMSVRACYDEIASISAAETTAVSTFMEVRERGSVQHLASTVKGTLAEGESPWRALEVVFPSITASGVPKTAAVDAIDRLESRRRGPYSGAVLVASSSGELEATLALRTVFSSGGKAWLRAGAGIVAQSTPEREFEETCEKLGSVAPYVIPR

SEQ ID NO: 95232 - protein, 461 aa, unidentified
  source 1..461: note = Grimontia marina
  REGION 1..461: note = tr|A0A128FKJ2|A0A128FKJ2_9GAMM Isochorismate synthase/isochorismate lyase OS=Grimontia marina OX=646534; GN = mbtI PE=4 SV=1
MTQYKELTLPTSAKTSRLLLSIANSGLADQFMIYEKPGEWSLGMGNLLSIDVYKNEIVVKQEDRIQIMGYEDFEPALTHITQNLPVENWRLYGQAKFELAYVFYGLTNTISLDKTNKLMSLFIPEYEVRISDKTATLRATSPAGLEKLVELFRLAERREKHGYDTDFVIEHVDLTIPSSCEYYKTAVQQAIADIQENHYQKVILSRQVQVSFPLDMAKSYEYGRQKNTPARSFILRQSGFEAAGFCPETVLEASPDGWVSTQPLAGTRSLGNSPEEELQLKSELISTTKEIAEHAISVRLAYEELDHVCDEESLSVCDFMSIKRRGSVQHLASRVKGKLSSNHSVWDAFKALFPAVTASGIPKKESLLAIKKYEASERALYSGSVMIVDPDGAMDAGLVLRSIYKDEEKCWLQAGAGIVDQSLPERELTETIEKLSCIAQYLVQDLQEPMPSIEHSKKETV

SEQ ID NO: 95233 - protein, 95 aa, unidentified
  source 1..95: note = Unknown
  REGION 1..95: note = tr|A0A3B1CTA0|A0A3B1CTA0_9ZZZZ Isochorismate pyruvate-lyase OS=hydrothermal vent metagenome OX=652676; GN = MNBD_NITROSPINAE02-760 PE=4 SV=1
MTVDDCKNLADVRENIDRLDQRIIELMAERSQYVARAARFKKDYKEVEDPSRVEQVIENKKALAIKYGLSPYVAEQTYRAMIAAFIEFEKKEFTK

SEQ ID NO: 95234 - protein, 140 aa, Janthinobacterium sp.
  REGION 1..140: note = tr|A0A1A7C4Z9|A0A1A7C4Z9_9BURK Isochorismate pyruvate lyase OS=Janthinobacterium sp. S3-2 OX=1747903; GN = ASR47_101434 PE=4 SV=1
MRLSLMTVFLLAAGTAQAQAPAATPAAPWGSPTVGNGACCQSIDEVRGHIDRIDAEIVRLMAERGRYVHEAARFKPDPTHVEVPARAEAVVRKAMALAQQNGLSPQIAEATYRPMLRAYLDYEQQVFAKASAAGQTPWQK

SEQ ID NO: 95235 - protein, 124 aa, Labrenzia alexandrii
  REGION 1..124: note = tr|A0A5E8H614|A0A5E8H614_LABAD Chorismate mutase; OS = Labrenzia alexandrii (strain DSM 17067 / NCIMB 14079 / DFL-11) OX=244592 GN=SADFL11_4916 PE=4 SV=1
MFAKQERMTDIKRPADCHTKADIRTAIDALDQDLLKLFAQRQGYVRRMAELKQRPDEAFDHDRIETMVAALKNRAEDLGLEADQAEQVWRVLIDWNVAYEKRTIAARLEKGQAPNTSWVSKETR

SEQ ID NO: 95236 - protein, 434 aa, Mycobacterium marinum
  REGION 1..434: note = tr|A0A2Z5YID1|A0A2Z5YID1_MYCMR Isochorismate synthase/isochorismate lyase OS=Mycobacterium marinum; OX = 1781 GN=mbtI PE=4 SV=1
MPADIDPADLAAELAAVLCEAVRPEGTQYLLYERDGQWVLASGVQAMVELDSDEVRVIRDGVTQRQQWSGRPGEVLGEAIDRLLLETDQVFGWVAFEFGLYRYGLQARLAPGTPLARVFWPRTRIVVTRDDVSLFGAEPHEREAVLRLLRDGLPTVPRSRTIDLSADPSGYRDRVAVAVREIASGAYHKVILSRCVEVPFRLDFPSTYRRGRERNTPVRSFLLRLGGIRALGFSPELVTAVSPSGVVVTEPLAGTRALGRGAAHDRLARGDLESNAKEIVEHAISVRTSLHEITEVAEPGTAAVIDFMSVRERGSVQHLGSTISARLDAASDRMNALEALFPAVTASGIPKADGVDAILRLDEGPRGLYSGAVVMLSADGGLDAALTLRAAYERDGRTWLRAGAGIIEASQPEREFEETCEKLSTLAPYLVERQ

SEQ ID NO: 95237 - protein, 450 aa, Mycobacterium tuberculosis; identical to SEQ ID NO: 94322
  REGION 1..450: note = sp|P9WFX0|MBTI_MYCTO Salicylate synthase; OS = Mycobacterium tuberculosis (strain CDC 1551 / Oshkosh); OX = 83331 GN=mbtI PE=3 SV=1

SEQ ID NO: 95238 - protein, 450 aa, unidentified
  source 1..450: note = Mycobacteroides franklinii
  REGION 1..450: note = tr|A0A4R8R9H9|A0A4R8R9H9_9MYCO Isochorismate synthase/isochorismate lyase OS=Mycobacteroides franklinii; OX = 948102 GN=mbtI PE=4 SV=1
MSAVVDPDTGARTWVSVQEGLPDGFAPADLASVLAQEIPERQGDEYLIYERDGEWVLAIGARASVELDSDGLRILRDGSVEKRGWSGHPGAALEVAVNEISDGVHRVFGWVAFEFGTYRFNLQHRLAPGTPLARVFTPRAEVVITADGVSVSDERYVDEISRLIDQGAPAIPAPASIDLVPDPSDYRGRVGIATAEIRSGLYHKVILSRRVEVPFAMDFPSTYRLGRHNNTPVRSFLLRLGGIRALGYSPELVTAVEADGTVITQPLAGTRAFGRGADADRVARDDLESNAKEIVEHAISVRSSLAEIAEVVDPGSTKVTDFMTVRERGSVQHLGSTVSGELSPGMTRMDALEALFPAVTASGIPKAEGVDAILRLDDHPRGLYSGAVLMMYPNGGLDAALTLRSAYEHDGHTWLRAGAGIIEASTPEREFEETCEKLGSIAPYVIKREA

SEQ ID NO: 95239 - protein, 450 aa, unidentified
  source 1..450: note = Mycobacteroides salmoniphilum
  REGION 1..450: note = tr|A0A4R8S4J7|A0A4R8S4J7_9MYCO Isochorismate synthase/isochorismate lyase OS=Mycobacteroides salmoniphilum OX=404941 GN=mbtI PE=4 SV=1
MSTVADSDTGAQTWVSVQEGLPDGFAPADLASVLAQEIPERHGDEYLVYERDGEWVLAIGARASVELDSDGLRIIRDGSVEQRGWTGHPGAALEQAVNEISDGVHRVFGWVAFEFGTYRFGLQHRLTPGTPMARVFAPRAEVVITADGVSVCEESYVEEIRRVLDQGAPAVPASESIDLVPDPSDYRGRVGIATAEIRSGLYHKVILSRRVEVPFAMDFPSTYRLGRHNNTPVRSFLLRLGGIRALGYSPELVAAVEADGTVITQPLAGTRAFGRGEDADRVARDDLESNAKEIVEHAISVRSSLAELGEVAELGSTKVTDFMTVRERGSVQHLGSTVSGALSAGMTRMDALEALFPAVTASGIPKAEGVDAILRLDDHPRGLYSGAVVMMSPDGGLDAALTLRSAYEQDGHTWLRAGAGIIEASTPDREFEETCEKLGSIAPYVIKREV

SEQ ID NO: 95240 - protein, 466 aa, Nocardia seriolae
  REGION 1..466: note = tr|A0A0B8N3I2|A0A0B8N3I2_9NOCA Isochorismate synthase OS=Nocardia seriolae OX=37332 GN=mbtI PE=4 SV=1
MLTSLGKLGKHNLGGLVSVADERVRVTGEQRWGEHVTDPAAAVSALAAAELFGEYVVYERPGEWVFAADPIGGVELDADELRVSWDGRTTAGPWTGSPAQAVDRALAGLPSAGRNAFGWIGFEFCAWSLGAIEHVHPRATLAHLMIPRIEVRIDATGVRVSGATPAETGDIHELITTAQRTAPPVAHPVDVTGDPTGYRDRVAAGVAEIADGRYQKVILSRKVELPFAVDIPATYRLGRMNNTPARSFLLRLGGLEAAGFSPELVASVDRDRVVTTEPLAGTRAFGRGDDLDLAARAELIRDPKEIVEHAISVQTSFAEIAAVAEPDTTAVSDFMAVRERGSVQHLASTVRGTLAAGRSPWDALETLFPSVTASGIPKAEGVDAVFRLDHDPRGLYSGAVVTVSPEGELEATLVLRAVYQSGAGAWLRAGAGVVGQSRPEREFEETCEKLGSVAPYVVKADTAVRA

SEQ ID NO: 95241 - protein, 99 aa, unidentified
  source 1..99: note = Paenibacillus nuruki
  REGION 1..99: note = tr|A0A1E3KXX6|A0A1E3KXX6_9BACL Isochorismate lyase; OS = Paenibacillus nuruki OX=1886670 GN=pchB PE=4 SV=1
MRDCQNLDEVRERIDQLDQHIIQLLSERSQYVRQAAAFKKDKDAVKAPARVESVIHKVRQLAVEHALNPSIAEKVYRAMIAGFIEDELQEHERINPSNR

SEQ ID NO: 95242 - protein, 100 aa, Paracoccus yeei
  REGION 1..100: note = tr|A0A386UNB9|A0A386UNB9_9RHOB Chorismate mutase; OS = Paracoccus yeei OX=147645 GN=PY32053_02463 PE=4 SV=1
MTDEPILPPDSAMHALRARIDELDSRLVALLSERAALIDEAARIKLREGLPARIDSRVEEVAANARRLAEEKGLDPGLAESLWRMMMEHFIAQEDRLLSR

SEQ ID NO: 95243 - protein, 127 aa, unidentified
  source 1..127: note = Phormidesmis priestleyi
  REGION 1..127: note = tr|A0A0P8C5P5|A0A0P8C5P5_9CYAN Isochorismate pyruvate lyase OS=Phormidesmis priestleyi Ana OX=1666911; GN = pchB PE=4 SV=1
MTFYRHFTATEWEPKVGYCRALRAENFIYLSGTAPIDEDGNTFAPGDAYAQACRCFEIIRDTLQAMGSGLHQTVRTRMYVTDISQWQAFGKAHQEFFGEHPPVTTMVEVKALIAPDMLIEVEAEAIA

SEQ ID NO: 95244 - protein, 97 aa, unidentified
  source 1..97: note = Pontivivens insulae
  REGION 1..97: note = tr|A0A2R8A8N6|A0A2R8A8N6_9RHOB Isochorismate pyruvate lyase OS=Pontivivens insulae OX=1639689 GN=pchB; PE = 4 SV=1
MTDPATCRNMTELRAGIDALDIELMKLLARRVSFIDRAIELKPAEGIKARAEDRVLAVLANARRNATQQGFDPDLAESLWREMIEWSIAREEVVLGK

SEQ ID NO: 95245 - protein, 101 aa, Pseudomonas aeruginosa
  REGION 1..101: note = sp|Q51507|PCHB_PSEAE Isochorismate pyruvate lyase; OS = Pseudomonas aeruginosa (strain ATCC 15692 / DSM 22644 / CIP 104116 / JCM 14847 / LMG 12228 / 1C / PRS 101 / PAO1 ); OX = 208964 GN=pchB PE=1 SV=2
MKTPEDCTGLADIREAIDRIDLDIVQALGRRMDYVKAASRFKASEAAIPAPERVAAMLPERARWAEENGLDAPFVEGLFAQIIHWYIAEQIKYWRQTRGAA

SEQ ID NO: 95246 - protein, 101 aa, Pseudomonas aeruginosa
  REGION 1..101: note = tr|A0A2R3J0Z6|A0A2R3J0Z6_PSEAI Isochorismate lyase; OS = Pseudomonas aeruginosa OX=287 GN=pchB PE=4 SV=1
MKMPEDCTGLADIREAIDRIDHDIVLALGRRMDYVKAASRFKASEAAIPAPERVAAMLPERARWAEENGLDAPFVEGLFAQIIHWYIAEQIKYWRQTRGAA

SEQ ID NO: 95247 - protein, 100 aa, Pseudomonas fluorescens
  REGION 1..100: note = tr|A0A5E7C657|A0A5E7C657_PSEFL Isochorismate pyruvate lyase OS=Pseudomonas fluorescens OX=294 GN=pchB_2; PE = 4 SV=1
MAVTCTTLEQVRENIDRLDGQIVALLAERGSFVSQAARFKKDSDGVKAPQRVEQVINKVRELSHTLGANPDVTEQVYRAMISAFIQQELAEHAALTQPTT

SEQ ID NO: 95248 - protein, 109 aa, Pseudomonas fuscovaginae
  REGION 1..109: note = tr|A0A0M9GCA2|A0A0M9GCA2_9PSED Chorismate mutase-like enzyme OS=Pseudomonas fuscovaginae OX=50340; GN = PF66_05928 PE=4 SV=1
MPTVNLKTPEACLDLNDIRDGIDALDHQILETLQQRLRYVKAAARFKPSEQSIPAPERVAAMLAERRQWAEAAGLEVGFIEKLYEQIIHWNIQQQILHWRATYPERVQA

SEQ ID NO: 95249 - protein, 106 aa, Pseudomonas sp.
  REGION 1..106: note = tr|A0A2N7R696|A0A2N7R696_9PSED Isochorismate pyruvate lyase OS=Pseudomonas sp. AD21 OX=396378 GN=pchB; PE = 4 SV=1
MEVINNLQPEACAGMEEIRREIDALDQAVIQLLGKRFHYVLAASKFKTSATSVRAPERFKAMLVTRREWAEAEGLNPDAIEKMYSDLVNHFIAEEMKHWAAHQADT

SEQ ID NO: 95250 - protein, 102 aa, Pseudomonas synxantha
  REGION 1..102: note = tr|A0A3G7UPW1|A0A3G7UPW1_9PSED Isochorismate pyruvate lyase OS=Pseudomonas synxantha OX=47883; GN = C4K02_2264 PE=4 SV=1
MKTPEHCTGLHDIRHAIDSLDQQIIDALGLRMQYVKAASAFKPDQASIAAPERVAAMLPQRRQWAQDVGLDGEFIESLFNQIIHWYIAEQTAFWLQKKSKAV

SEQ ID NO: 95251 - protein, 106 aa, Pseudomonas syringae
  REGION 1..106: note = tr|A0A0K8M9I7|A0A0K8M9I7_PSESF Chorismate mutase; OS = Pseudomonas syringae pv. actinidiae OX=103796 GN=pchB; PE = 4 SV=1
MNVVKSAPECENLGDIRQGIDDLDRQIVQILARRLTYVKAATRFKASQQAIPAPDRVRAMLEERRQWAHDAGLPVDETEDFFKDLIHWFINQQITHWRVLHPEAQP

SEQ ID NO: 95252 - protein, 101 aa, unidentified
  source 1..101: note = Pseudomonas wadenswilerensis
  REGION 1..101: note = tr|A0A380SZ34|A0A380SZ34_9PSED Isochorismate pyruvate lyase OS=Pseudomonas wadenswilerensis OX=1785161; GN = pchB 1 PE=4 SV=1
MKSPDACEGLPDIRIAIDSLDHQIIELMRQRMAYVKAAARFKPTESSIAAPERVAQMLPQRRQWAEEAGLDAHFVETLFAQIIHWYIAQQVRHWRTMRVPA

SEQ ID NO: 95253 - protein, 467 aa, Rhizobium etli
  REGION 1..467: note = tr|A0A1L5PA15|A0A1L5PA15_RHIET Isochorismate synthase/isochorismate lyase/chorismate mutase; OS = Rhizobium etli 8C-3 OX=538025 GN=mbtI PE=4 SV=1
MTVFTSGIAQSNAAYVVPLAVDAVTAAASLASAVEGDALTSPQPAKNRAGAEPYILYEKAGEISFAAGSMMEIRLDRAGLQLTTPTGSRREPLTDRPLRQVQAMLASVLSIQKGSQPRVFGWAAFELSYLLQGLPIADDVGTLLYLFVPQHEARIRSGEADLRVSDPQVAELWLTALRNAEPNDPSERIHVDEVSDATGYVDAAREAIKAIDGSKLRKIILSRSVFLAEEVDLVASYRTLRRNNTPVRSFLLRLGGIAAAGVSPGAIIEVSATGAVVTQPLAGTRAYTGQPELDASLRDELLSDPKEIYEHALSVKLAQDEIAAVSQPGTVFVEDFMHVVSRGSVQHLASRVRGQLRSDASCWDALGSVFPAVTASGIPKRDACREISLREQSARGLYSGAVLAIDGSGQFDAALVLRSVYQVEGATWLRAGAGLISQSNAERELEETREKMRSVSRFLVPRSGSTA

SEQ ID NO: 95254 - protein, 103 aa, Roseibaca ekhonensis
  REGION 1..103: note = tr|A0A3B0MKP0|A0A3B0MKP0_9RHOB Isochorismate pyruvate lyase OS=Roseibaca ekhonensis OX=254356 GN=pchB_1; PE = 4 SV=1
MPDPKSCTDMAQLRAQIDQIDRELVTLLTQRAAHIDRAIELKPGEGLPARIDARVRDVLDRVAAEATTQGLDPALARALWSELIDWSIAREERVLGATRKGTA

SEQ ID NO: 95255 - protein, 103 aa, Rubellimicrobium thermophilum
  REGION 1..103: note = tr|S9QWR6|S9QWR6_9RHOB Chorismate mutase; OS = Rubellimicrobium thermophilum DSM 16684 OX=1123069; GN = ruthe_01567 PE=4 SV=1
MKRPADCKTMADIRAEIDRVDRELVRLLAERTGYIDRAAEIKGPLQMPARIASRVEEVVANVRREAVAQGLPPDLIEKLWRRLIDWSIAREEGVLGPEWEDHP

SEQ ID NO: 95256 - protein, 98 aa, unidentified
  source 1..98: note = Salipiger profundus
  REGION 1..98: note = tr|A0A1U7D2G2|A0A1U7D2G2_9RHOB Isochorismate pyruvate lyase OS=Salipiger profundus OX=1229727; GN = Ga0080559_TMP1516 PE=4 SV=1
MRDPASLEDMTALRAEIDATDRELSALMAHRARLIARAAELKAGNGWPARITDRVDEVIANARANAERDGWDPALAELVWQELVEWSIRREQSALGRE

SEQ ID NO: 95257 - protein, 98 aa, Sphingobium sp.
  REGION 1..98: note = tr|A0A173KSD0|A0A173KSD0_9SPHN Isochorismate lyase; OS = Sphingobium sp. EP60837 OX=1855519 GN=pchB PE=4 SV=1
MNPENYTTMAEVRAGVDEIDRQLVALFAQRFAHMRAAARIKPERSAVRDEPRKAEVIENVRQAADRLDAPAEILATLWDQLVEASIAYEMTEFDRLKA

SEQ ID NO: 95258 - protein, 447 aa, Streptomyces sp.
  REGION 1..447: note = tr|A0A2Z5JU62|A0A2Z5JU62_9ACTN Isochorismate synthase/isochorismate lyase OS=Streptomyces sp. Go-475; OX = 2072505 GN=mbtI PE=4 SV=1
MLRYRSARTELPGDPVLLAARLAESELFDQYVVYEREGEWWFAGDALGEVVVDRSEVRRRWLSEDAAVPLGPHPLRQVQEQLDRMAVEGWHAFGWMAYEFAHLNAGRPDRAGDARLLHLVVPHSEVRLRQGEAEVRSTDPETLEALLRLLAEPVPRTTVEARPIDVADTAGTYPGLVARAIEEIRAGELQKVILSRTVPVPYPVDFTATYVHGRSHNTPARSYLMNLGGRRVVGFSPETVAEVGADGRALTQPLAGTRARGLGEQEDERLRAELLADPKEISEHVLSVKLAEEEMATVCRPGTVSVRDLLSVRRRGSVQHLGSSVHGLLAENTTAWDVLRAVFPAVTASGIPKAPAYDCIARLEEEPRGIYSGAALMAGSDGSLDAALVLRSLFEEDGRTWLRAGAGILAGSTPARELEETCEKLRSVAPYVVPAQPAPLAAPSLRS

SEQ ID NO: 95259 - protein, 440 aa, Streptomyces sp.
  REGION 1..440: note = tr|A0A2K8RKP6|A0A2K8RKP6_9ACTN Isochorismate synthase/isochorismate lyase OS=Streptomyces sp. M56; OX = 1495638 GN=mbtI PE=4 SV=1
MESRHDPAATAVHLAKAGLADQYAVYEREGVWHFAAGSAVTLTADAVGITARADGRSWTSRVGTRPLEAFAQALAALENAGHQERHFYGWAAFELAHFLHGDPAAGGTAPLLHALVPCVEVSLTSDRAVVRAVDEAWAQKVGDLLAEPSTARITVDADTPVTAEGIIAAGTAAYGEAVARTVADIRAGLLEKAVLSRKVPLPAGSRADFAASYLAGRRANTPARSYLLDLGGRRAAGFSPETVLEVRKDGRVSTQPLAGTRALGTDPMQNERRRKELLTDPKEIHEHAVSVRLARDEMDAVCRDGSVVVEEFMAVKPRGSVQHLASRVTGRLGSGTGPWDAFASLFPAITATGVSKQAALGVLARYEDGPRGLYGGAVFRGSTDGSLDAALVLRTLLGEGGEVWLRAGAGVTGQSVPEREIEETCEKLRSVAPHLRYTDG

SEQ ID NO: 95260 - protein, 426 aa, Streptomyces sp.
  REGION 1..426: note = tr|A0A1B9F2K3|A0A1B9F2K3_9ACTN Isochorismate synthase/isochorismate lyase OS=Streptomyces sp. PTY087I2; OX = 1819298 GN=mbtI PE=4 SV=1
MAAALAAESTDAYVLYENREEVCWAEGEAAAVEVDATGVWLECGGERSPLDTDLRPLAAAGQALAEMGGADWRAYGWATFELATSCSDAGKSPGPLARLFLPRAEIRFGDGVAVLRAQDEKALDAMVLRLAGAESRPAISEGRIEADVDFHGADAYRQAVAEAVREIRQGALDKVILSREVPVPGEIDLPATYVTGRRNNDPARSFLLRLGEWEAAGFSPEIVARVTAEGEVNAQPLAGTRALVGEPAVDDAARKELLRDAKEVFEHAISVRLAAEELAEVCEDGTVRVAEFMSVRERGSVQHLASYLVGSLREGATSWDAFATLFPAITASGIPKKEACERIRLSEKTSRGLYSGAVIMVDGDGTLDAALVLRSVYRRAGRTWLRAGAGVVAQSDPERELEETREKLRSVGRFLVPAVEPVHSAS

SEQ ID NO: 95261 - protein, 113 aa, Tepidimonas aquatica
  REGION 1..113: note = tr|A0A554WEN0|A0A554WEN0_9BURK Isochorismate pyruvate lyase OS=Tepidimonas aquatica OX=247482 GN=pchB; PE = 4 SV=1
MTRPQGFKAVTLHTMTDVRHQVDTLDAQLVPLLLQRLQCMRAAAQIKSKRDQVRDDQRVAAVLDHVKRRARQLGADASDVDAIEAIYSQLIEFCIGYELRHFDQKSAQQEVGR

SEQ ID NO: 95262 - protein, 123 aa, Variovorax sp.
  REGION 1..123: note = tr|A0A2J7VWY5|A0A2J7VWY5_9BURK Isochorismate pyruvate lyase OS=Variovorax sp. B4 OX=2021405 GN=pchB; PE = 4 SV=1
MTEKEPDAHGAALRRFLDPAYVPLADNLAQVRERIDAIDVQIVELLAERGRYVKDAARFKRDAFQVSAPQRQQEVFDKVRRLAEEKGAYPEVVEAAYRALVAGFIAREQRDHAEMVEIGEGQP

SEQ ID NO: 95263 - protein, 96 aa, unidentified
  source 1..96: note = Yoonia vestfoldensis
  REGION 1..96: note = tr|A0A1Y0E8S9|A0A1Y0E8S9_9RHOB Isochorismate pyruvate lyase OS=Yoonia vestfoldensis OX=245188 GN=pchB; PE = 4 SV=1
MADIRAEIDRIDAALVQILAERAAYIDRAAAIKAVAALPARITPRVEQVVSNVRDHAQAHGLSPDLVEMLWRQLIDWSIAREETRLGPDSDREDMR

SEQ ID NO: 95264 - DNA, 918 bp, unidentified
  source 1..918: mol_type = unassigned DNA; note = Oxalobacteraceae bacterium
  misc_feature 1..918: note = JX491462.1.918 Bacteria Proteobacteria Gammaproteobacteria Burkholderiales Oxalobacteraceae Undibacterium Oxalobacteraceae bacterium 25-11PB
acgatctaaggatgaaagcgggggatcgcaagacctcgtgctcatggagtggccgatatctgattagctagttggtagggtaaaagcctaccaaggcgacgatcagtagctggtttgagagaacgaccagccacactggaactgagacacggtccagactcctacgggaggcagcagtggggaattttggacaatgggggcaaccctgatccagcaatgccgcgtgagtgaagaaggccttcgggttgtaaagctcttttgtcagggaagaaacggtgagttctaatacaacttgctaatgacggtacctgaagaataagcaccggctaactacgtgccagcagccgcggtaatacgtagggtgcaagcgttaatcggaattactgggcgtaaagcgtgcgcaggcggttttataagtctgatgtgaaatccccgggctcaacctgggaactgcattggagactgtaaggctagagtgtgtcagaggggggtagaattccacgtgtagcagtgaaatgcgtagatatgtggaggaataccgatggcgaaggcagccccctgggataacactgacgctcatgcacgaaagcgtggggagcaaacaggattagataccctggtagtccacgccctaaacgatgtctactagttgtcgggtcttaattgacttggtaacgcagctaacgcgtgaagtagaccgcctggggagtacggtcgcaagattaaaactcaaaggaattgacggggacccgcacaagcggtggatgatgtggattaattcgatgcaacgcgaaaaaccttacctacccttgacatggaaggaatcccgaagagatttgggagtgctcgaaagagaacctttacacaggtgctgcatggctgtcgtcagctcgtgtcgtgagatgttgggttaagtcc

SEQ ID NO: 95265 - DNA, 1411 bp, unidentified
  source 1..1411: mol_type = unassigned DNA; note = Oxalobacteraceae bacterium
  misc_feature 1..1411: note = KX953867.1.1411 Bacteria Proteobacteria Gammaproteobacteria Burkholderiales Oxalobacteraceae Duganella Oxalobacteraceae bacterium
tgcaagtcgaacggcagcgcggggcaacctggcggcgagtggcgaacgggtgagtaatatatcggaacgtaccctggagtgggggataacgtagcgaaagttacgctaataccgcatacgatctaaggatgaaagtgggggatcgcaagacctcatgctcctggagcggccgatatctgattagctagttggtagggtaaaagcctaccaaggcatcgatcagtagctggtctgagaggacgaccagccacactggaactgagacacggtccagactcctacgggaggcagcagtggggaattttggacaatgggcgcaagcctgatccagcaatgccgcgtgagtgaagaaggccttcgggttgtaaagctcttttgtcagggaagaaacgacatcctctaatacagggtgttaatgacggtacctgaagaataagcaccggctaactacgtgccagcagccgcggtaatacgtagggtgcaagcgttaatcggaattactgggcgtaaagcgtgcgcaggcggttttgtaagactgacgtgaaatccccgggctcaacctgggaatggcgttggtgactgcaaggctagagtttggcagaggggggtagaattccacgtgtagcagtgaaatgcgtagatatgtggaggaacaccgatggcgaaggcagccccctgggtcaaaactgacgctcatgcacgaaagcgtggggagcaaacaggattagataccctggtagtccacgccctaaacgatgtctactagttgtcgggtcttaattgacttggtaacgcagctaacgcgtgaagtagaccgcctggggagtacggtcgcaagattaaaactcaaaggaattgacggggacccgcacaagcggtggatgatgtggattaattcgatgcaacgcgaaaaaccttacctacccttgacatggatggaatcccggagagatttgggagtgcccgaaagggaaccatcacacaggtgctgcatggctgtcgtcagctcgtgtcgtgagatgttgggttaagtcccgcaacgagcgcaacccttgtcattagttgctacgaaagggcactctaatgagactgccggtgacaaaccggaggaaggtggggatgacgtcaagtcctcatggcccttatgggtagggcttcacacgtcatacaatggtacatacagagcgccgccaacccgcgagggggagctaatcgcagaaagtgtatcgtagtccggattgtagtctgcaactcgactgcatgaagttggaatcgctagtaatcgcggatcagcatgtcgcggtgaatacgttcccgggtcttgtacacaccgcccgtcacaccatgggagcgggttttaccagaagtaggtagcttaaccgcaaggagggcgcttaccacggtaggattc

SEQ ID NO: 95266 - DNA, 1504 bp, Oxalobacter formigenes
  source 1..1504: mol_type = unassigned DNA
  misc_feature 1..1504: note = HG917902.1.1504 Bacteria Proteobacteria Gammaproteobacteria Burkholderiales Oxalobacteraceae Oxalobacter Oxalobacter formigenes
tggctcagattgaacgctggcggcatgctttacacatgcaagtcgaacggcagcatgggggcaaccctgatggcgagtggcgaacgggtgagtaatatatcggaacgtacccgagagtgggggacaaccagtcgaaagattggctaataccgcatacgatctacggatgaaagtgggggaccttcgggcctcacgctcctggagcggccgatagctgattagctggttggtggggtaaaggcctaccaaggcgatgatcagtagctggtctgagaggacgatcagccacactgggactgagacacggcccagactcctacgggaggcagcagtggggaattttggacaatgggggcaaccctgatccagcaatgccgcgtgagtgaagaaggccttcgggttgtaaagctcttttgtcagggaagaaaaggaccgggttaataccctggtttcatgacggtacctgaagaataagcaccggctaactacgtgccagcagccgcggtaatacgtagggtgcgagcgttaatcggaattactgggcgtaaagcgtgcgcaggcggttgtgtaagacagatgtgaaatgcccgggcttaacctgggaattgcatttgtgactgcacggctagagtgtgtcagaggggggtagaattccacgtgtagcagtgaaatgcgtagatatgtggaggaataccgatggcgaaggcagccccctgggataacactgacgctcatgcacgaaagcgtggggagcaaacaggattagataccctggtagtccacgccctaaacgatgtcgactagttgttgggtcttaattgacttagtaacgcagctaacgcgtgaagtcgaccgcctggggagtacggtcgcaagattaaaactcaaaggaattgacggggacccgcacaagcggtggatgatgtggattaattcgatgcaacgcgaaaaaccttacctacccttgacatgtcaggaaccctgaagagattcgggggtgctcgaaagagaacctgaacacaggtgctgcatggctgtcgtcagctcgtgtcgtgagatgttgggttaagtcccgcaacgagcgcaacccttgtcattagttgctacgaaagggcactctaatgaaactgccggtgacaaaccggaggaaggtggggatgacgtcaagtcctcatggcccttatgggtagggcttcacacgtcatacaatggtgcatacagagggttgccaacccgcgagggggagctaatcccagaaagtgcatcgtagtccggattggagtctgcaactcgactccatgaagttggaatcgctagtaatcgcggatcagcatgtcgcggtgaatacgttcccgggtcttgtacacaccgcccgtcacaccatgggagcgggttttaccagaagtaggtagcttaaccgcaaggagggcgcttaccacggtaggattcgtgactggggtgaagtcgtaacaaggtagccgtatcggaaggtgcggctggatca

SEQ ID NO: 95267 - DNA, 1491 bp, Oxalobacter formigenes
  source 1..1491: mol_type = unassigned DNA
  misc_feature 1..1491: note = U49756.1.1491 Bacteria Proteobacteria Gammaproteobacteria Burkholderiales Oxalobacteraceae Oxalobacter Oxalobacter formigenes
tgatcctggctcagattgaacgctggcggcatgctttacacatgcaagtcgaacggcagcatgggggcaacctgatggcgagtggcgaacgggtgagtaatatatcggaacgtacccgagagtgggggacaaccagtcgaaagattggctaataccgcatacgatctacggatgaaagtgggggaccttcgggcctcacgctcctggagcggccgatagctgattagctagttggtggggtaaaggcctaccaaggcgatgatcagtagctggtctgagaggacgatcagccacactgggactgagacacggcccagactcctacgggaggcagcagtggggaattttggacaatgggggcaaccctgatccagcaatgccgcgtgagtgaagaaggccttcgggttgtaaagctcttttgtcagggaagaaaaggactgggttaataccctggtttcatgacggtacctgaagaataagcaccggctaactaggtgccagcagccgcggtaatacgtagggtgcgagcgttaatcggaattactgggcgtaaagcgtgcgcaggcggttgtgtaagacagatgtgaaatgcccgggcttaacctgggaattgcatttgtgactgaacggctagagtgtgtcagaggggggtagaattccacgtgtagcagtgaaatgcgtagatatgtggaggaataccgatggcgaaggcagttccctgggataacactgacgatcatgcacgaaagcgtggggagcaaacaggattagataccctggtagtccacgccctaaacgatgtcgactagttgttgggtcttaattgacttagtaacgaaactaacgcgtgaagtcgaccgcctggggagtacggtcgcaagattaaaactcaaaggaattgacggggatttaccaagcggtggatgatgtggattaattcgatgcaacgcgaaaaaccttacctacccttgacatgtcaggaaccctgaagagattcgggggtgctcgaaagagaacctgaacacaggtgctgcatggctgttgtcagctcgtgtcgtgagatgttgggttaagtcccgcaacgagcgcaacccttgtcattagttgctacgaaagggcactctaatgaaactgccggtgacaaaccggaggaaggtggggatgacgtcaagtcctcatggcccttatgggtagggcttcacacgtcatacaatggtgcatacagagggttgccaacccgcgagggggagctaatcccagaaagtgcatcgtagtccggattggagtctgcaactcgactccatgaagttggaatcgctagtaatcgcggatcagcatgtcgcggtgaatacgttcccgggtcttgtacacaccgcccgtcacaccatgggagcgggttttaccagaagtaggtagcttaaccgcaaggagggcgcttaccacggtaggattcgtgactggggtgaagtcgtaacaaggtaaagccgaatt

SEQ ID NO: 95268 - DNA, 1250 bp, unidentified
  source 1..1250: mol_type = unassigned DNA; note = Trinickia symbiotica
  misc_feature 1..1250: note = FN543709.1.1250 Bacteria Proteobacteria Gammaproteobacteria Burkholderiales Burkholderiaceae Burkholderia-Caballeronia-Paraburkholderia Trinickia symbiotica
aacgggtgagtaagacatcggaacgtgtcctggagtgggggatagcccggcgaaagccggattaataccgcatacgctctgtggaggaaagcgggggatcgcaagacctcgcgctcaaggggcggccgatggcggattagctagttggtggggtaaaggcctaccaaggcgacgatccgtagctggtctgagaggacgaccagccacactgggactgagacacggcccagactcctacgggaggcagcagtggggaattttggacaatgggggcaaccctgatccagcaatgccgcgtgtgtgaagaaggccttcgggttgtaaagcacttttgtccggaaagaaatcctcggggctaatatccctgggggatgacggtaccggaagaataagcaccggctaactacgtgccagcagccgcggtaatacgtagggtgcgagcgttaatcggaattactgggcgtaaagcgtgcgcaggcggtgcgttaagagcgatgtgaaatccccgggcttaacctgggaactgcattgttgactggcgcgctagagtatggcagaggggggtagaattccacgtgtagcagtgaaatgcgtagagatgtggaggaataccgatggcgaaggcagccccctgggccaatactgacgctcatgcacgaaagcgtggggagcaaacaggattagataccctggtagtccacgccctaaacgatgtcaactagttgttggggattcatttccttagtaacgaagctaacgcgtgaagttgaccgcctggggagtacggtcgcaagattaaaactcaaaggaattgacggggacccgcacaagcggtggatgatgtggattaattcgatgcaacgcgaaaaaccttacctacccttgacatggacggaaccctggtgagagctgggggtgcccgaaagggagccgtcacacaggtgctgcatggctgtcgtcagctcgtgtcgtgagatgttgggttaagtcccgcaacgagcgcaacccttgtccttagttgctacgcaagagcactctaaggagactgccggtgacaaaccggaggaaggtggggatgacgtcaagtcctcatggcccttatgggtagggcttcacacgtcatacaatggtcggaacagagggttgccaacccgcgagggggagccaatcccagaaaaccgatcgtagtccggattgcactctgcaactcgagtgcatgaagctggaatcgctagtaatcgcggatcagc

SEQ ID NO: 95269 - DNA, 1438 bp, Massilia consociata
  source 1..1438: mol_type = unassigned DNA
  misc_feature 1..1438: note = FN814307.1.1438 Bacteria Proteobacteria Gammaproteobacteria Burkholderiales Oxalobacteraceae Massilia Massilia consociata
gaacgctggcggcatgctttacacatgcaagtcgaacggcagcacgggcttcggcctggtggcgagtggcgaacgggtgagtaatatatcggaacgtacccagaagtgggggataacgtagcgaaagttacgctaataccgcatacgatctacggatgaaagtgggggaccttcgggcctcatgcttgtggagcggccgatatctgattagctagtaggtagggtaaaggcctacctaggcgacgatcagtagctggtctgagaggacgaccagccacactgggactgagacacggcccagactcctacgggaggcagcagtggggaattttggacaatgggcgcaagcctgatccagcaatgccgcgtgagtgaagaaggccttcgggttgtaaagctcttttgtcagggaagaaacggctgaggttaataccttcggctaatgacggtacctgaagaataagcaccggctaactacgtgccagcagccgcggtaatacgtagggtgcaagcgttaatcggaattactgggcgtaaagcgtgcgcaggcggttttgtaagtctgacgtgaaatccccgggctcaacctgggaattgcgttggagactgcaaggctggagtctggcagaggggggtagaattccacgtgtagcagtgaaatgcgtagagatgtggaggaacaccgatggcgaaggcagccccctgggtcaagactgacgctcatgcacgaaagcgtggggagcaaacaggattagataccctggtagtccacgccctaaacgatgtctactagttgtcgggttttaattaacttggtaacgcagctaacgcgtgaagtagaccgcctggggagtacggtcgcaagattaaaactcaaaggaattgacggggacccgcacaagcggtggatgatgtggattaattcgatgcaacgcgaaaaaccttacctacccttgacatggaaggaatcccgaagagatttgggagtgcccgaaagggagccttcacacaggtgctgcatggctgtcgtcagctcgtgtcgtgagatgttgggttaagtcccgcaacgagcgcaacccttgtcattagttgctacgcaagagcactctaatgagactgccggtgacaaaccggaggaaggtggggatgacgtcaagtcctcatggcccttatgggtagggcttcacacgtcatacaatggtacatacagagggccgccaacccgcgagggggagctaatcccagaaagtgtatcgtagtccggattgtagtctgcaactcgactacatgaagttggaatcgctagtaatcgcggatcagcatgtcgcggtgaatacgttcccgggtcttgtacacaccgcccgtcacaccatgggagcgggttttaccagaagtaggtagcttaaccgcaaggagggcgcttaccacggtaggattc

SEQ ID NO: 95270 - DNA, 1455 bp, Sutterella stercoricanis
  source 1..1455: mol_type = unassigned DNA
  misc_feature 1..1455: note = AJ566849.1.1455 Bacteria Proteobacteria Gammaproteobacteria Burkholderiales Sutterellaceae Sutterella Sutterella stercoricanis
ggcggcatgctttacacatgcaagtcgaacggcagcacagggagcttgctcctgggtggcgagtggcgcacgggtgagtaatacatcggaacgtgtcctattgtgggggataactgtcggaaagggtggctaataccgcataagacctgagggtgaaagcgggggatcgcaagacctcgcgcaattggagcggccgatgcccgattagctagttggtgaggtaatagcttaccaaggcgacgatcggtagctggtctgagaggacgaccagccacactgggactgagacacggcccagactcctacgggaggcagcagtggggaattttggacaatgggggcaaccctgatccagccatgccgcgtgcaggatgaaggtcttcggattgtaaactgcttttgtcagggacgaaaaggattgtgctaataccatgatctgctgacggtacctgaagaataagcaccggctaactacgtgccagcagccgcggtaatacgtagggtgcaagcgttaatcggaattactgggcgtaaagcgtgcgcaggcggttctgtaagacagatgtgaaatccccgggctcaacctgggaattgcatttgtgactgcaggactagagttcatcagaggggggtggaattccaagtgtagcagtgaaatgcgtagatatttggaagaacaccaatggcgaaggcagccccctgggatgcgactgacgctcatgcacgaaagcgtggggagcaaacaggattagataccctggtagtccacgccctaaacgatgtctactggttgttggggattaatatccttggtaacgaagctaacgcgtgaagtagaccccctggggagagcggtcgcaagattaaaactcaaaggaattgacggggacccgcacaagcggtggatgatgtggattaattcgatgcaacgcgaaaaaccttacgtagccttgacatgccaggaatcctgaagagatttgggagtgcccgcaagggaatctggacacaggtgctgcatggctgtcgtcagctcgtgtcgtgagatgttgggttaagtcccgcaacgagcgcaacccttgtcattagttgctacgcaagagcactctaatgagactgccggtgacaaaccggaggaaggtggggatgacgtcaagtcctcatggcccttatggctagggcctcacacgtcatacaatggtcggaacagagggcagcgaagccgcgaggtggagcaaatcccagaaaaccgatcgtagtccggattgcagtctgcaactcgactgcatgaagtcggaatcgctagtaatcgcggatcagcatgccgcggtgaatacgttcccgggtcttgtacacaccgcccgtcacaccatgggagtggggttcaccagaagacgtttgtctaaccgtaaggaaggacggcgtccacggtgggtttcatgactggggtgaagtcgt

SEQ ID NO: 95271 - DNA, 1345 bp, Comamonas kerstersii
  source 1..1345: mol_type = unassigned DNA
  misc_feature 1..1345: note = AJ430347.1.1345 Bacteria Proteobacteria Gammaproteobacteria Burkholderiales Comamonadaceae Comamonas Comamonas kerstersii
tgccttacacatgcaagtcgaacggcagcacggacttcggtctggtggcgagtggcgaacgggtgagtaatacatcggaccgtgcctagtagtgggggataactactcgaaagagtggctaataccgcatgagatctacggatgaaagcaggggatcgcaagaccttgtgctactagagcggccgatggcagattaggtagttggtgggataaaagcttaccaagccaacgatctgtagctggtctgagaggacgatcagccacactgggactgagacacggcccatactcctacgggaggcagcagtggggaattttggacaatgggcgaaagcctgatccagcaatgccgcgtgcaggatgaaggccttcgggttgtaaactgcttttgtacggaacgaaaagcttcgggttaataccctggagtcatgacggtaccgtaagaataagcaccggctaactacgtgccagcagccgcggtaatacgtagggtgcaagcgttaatcggaattactgggcgtaaagcgtgcgcaggcggttttgtaagacagaggtgaaatccccgggctcaacctgggaactgcctttgtgactgcaaggctagagtacggcagagggggatggaattccgcgtgtagcagtgaaatgcgtagatatgcggaggaacaccgatggcgaaggcaatcccctgggcctgtactgacgctcatgcacgaaagcgtggggagcaaacaggattagataccctggtagtccacgccctaaacgatgtcaactggttgttgggtcttcattgactcagtaacgaaagctaacgcgtgaagttgaccggcctggggagtaccggcgcaagggttgaaacctcaaaggaattgacggggacccccgcacaagcggtggatgatgtggttaattcgatgcaacgcgaaaaaccttacccacctttgacatggcaggaatcctttagagatagaggagtgctcgaaagagaacctgcacacaggtgctgcatggctgtcgtcagctcgtgtcgtgagatgttgggttaagtcccgcaacgagcgcaacccttgccattagttgctacgaaagggcactctaatgggactgccggtgacaaaccggaggaaggtggggatgacgtcaagtcctcatggcccttataggtggggctacacacgtcatacaatggctggtacaaagggttgccaacccgcgagggggagctaatcccataaagccagtcgtagtccggatcgcagtctgcaactcgactgcgtgaagtcggaatcgctagtaatcgtggatcagcatgtcacggtgaatacgttcccgggtcttgtac

SEQ ID NO: 95272 - DNA, 1469 bp, unidentified
  source 1..1469: mol_type = unassigned DNA; note = Caballeronia sordidicola
  misc_feature 1..1469: note = AF512826.1.1469 Bacteria Proteobacteria Gammaproteobacteria Burkholderiales Burkholderiaceae Burkholderia-Caballeronia-Paraburkholderia Caballeronia sordidicola
ttgaacgctggcggcatgccttacacatgcaagtcgaacggcagcacgggggcaaccctggtggcgagtggcgaacgggtgagtaatacatcggaacgtgtcctgtagtgggggatagcccggcgaaagccggattaataccgcatacgatctacggaagaaagcgggggaccttagggcctcgcgctataggggcggccgatggcagattagctagttggtggggtaaaggcctaccaaggcgacgatctgtagctggtctgagaggacgaccagccacactgggactgagacacggcccagactcctacgggaggcagcagtggggaattttggacaatgggggcaaccctgatccagcaatgccgcgtgtgtgaagaaggccttcgggttgtaaagcacttttgtccggaaagaaaaccttcgctctaatacagtggagggatgacggtaccggaagaataagcaccggctaactacgtgccagcagccgcggtaatacgtagggtgcgagcgttaatcggaattactgggcgtaaagcgtgcgcaggcggttcgttaagacagatgtgaaatccccgggcttaacctgggaactgcatttgtgactggcgagctagagtatggcagaggggggtagaattccacgtgtagcagtgaaatgcgtagagatgtggaggaataccgatggcgaaggcagccccctgggccaatactgacgctcatgcacgaaagcgtggggagcaaacaggattagataccctggtagtccacgccctaaacgatgtcaactagttgttggggattcatttccttagtaacgtagctaacgcgtgaagttgaccgcctggggagtacggtcgcaagattaaaactcaaaggaattgacggggacccgcacaagcggtggatgatgtggattaattcgatgcaacgcgaaaaaccttacctacccttgacatggtcggaacctggctgaaaggctggggtgctcgaaagagaaccgatacacaggtgctgcatggctgtcgtcagctcgtgtcgtgagatgttgggttaagtcccgcaacgagcgcaacccttgtccttagttgctacgcaagagcactctaaggagactgccggtgacaaaccggaggaaggtggggatgacgtcaagtcctcatggcccttatgggtagggcttcacacgtcatacaatggtcggaacagagggctgccaacccgtgagggggagctaatcccagaaaaccgatcgtagtccggatcgtagtctgcaactcgactacgtgaagctggaatcgctagtaatcgcggatcagcatgccgcggtgaatacgttcccgggtcttgtacacaccgcccgtcacaccatgggagtgggttttaccagaagtggctagtctaaccgcaaggaggacggtcaccacggtaggattcatgactggggtgaagtcgtaacaaggtag

SEQ ID NO: 95273 - DNA, 1509 bp, Lysobacter enzymogenes
  source 1..1509: mol_type = unassigned DNA
  misc_feature 1..1509: note = AJ298291.1.1509 Bacteria Proteobacteria Gammaproteobacteria Xanthomonadales Xanthomonadaceae Lysobacter Lysobacter enzymogenes
ggctcagagtgaacgctggcggcaggcctaacacatgcaagtcgaacggcagcacagaggagcttgctccttgggtggcgagtggcggacgggtgaggaatacgtcggaatctgcctatttgtgggggataacgtagggaaacttacgctaataccgcatacgacctacgggtgaaagtgggggaccgcaaggcctcacgcagatagatgagccgacgtcggattagctagttggcggggtaaaggcccaccaaggcgacgatccgtagctggtctgagaggatgatcagccacactggaactgagacacggtccagactcctacgggaggcagcagtggggaatattggacaatgggcgcaagcctgatccagccatgccgcgtgtgtgaagaaggccttcgggttgtaaagcacttttgtccggaaagaaaagcttagggttaataaccctgagtcatgacggtaccggaagaataagcaccggctaacttcgtgccagcagccgcggtaatacgaagggtgcaagcgttactcggaattactgggcgtaaagcgtgcgtaggtggtttgttaagtctgatgtgaaagccctgggctcaacctgggaatggcattggaaactggcttactacagtgcggtagagggtagcggaattcccggtgtagcagtgaaatgcgtagatatcgggaggaacatccgtggcgaaggcggctacctggaccagcactgacactgaggcacgaaagcgtggggagcaaacaggattagataccctggtagtccacgccctaaacgatgcgaactggatgttgggggcaacttggccctcagtatcgaagctaacgcgttaagttcgccgcctgggaagtacggtcgcaagactgaaactcaaaggaattgacgggggcccgcacaagcggtggagtatgtggtttaattcgatgcaacgcgcagaaccttacctggccttgacatgtcgagaactttccagagatggattggtgccttcgggaactcgaacacaggtgctgcatggctgtcgtcagctcgtgtcgtgagatgttgggttaagtcccgcaacgagcgcaacccttgtccttagttgccagcacgtaatggtgggaactctaaggagaccgccggtgacaaaccggaggaaggtggggatgacgtcaagtcatcatggcccttacggccagggctacacacgtactacaatggtagggacagagggctgcaaacccgcgagggcaagccaatcccagaaaccctatctcagtccggattggagtctgcaactcgactccatgaagtcggaatcgctagtaatcgcagatcagcattgctgcggtgaatacgttcccgggccttgtacacaccgcccgtcacaccatgggagtttgttgcaccagaagcaggtagcttaaccttcgggagggcgctttgccacggtgttggccgatgactggggtgaaagtccgtaacaaggtagccgtatcggaaggt

SEQ ID NO: 95274 - DNA, 1542 bp, Cupriavidus taiwanensis
  source 1..1542: mol_type = unassigned DNA
  misc_feature 1..1542: note = AF300324.1.1542 Bacteria Proteobacteria Gammaproteobacteria Burkholderiales Burkholderiaceae Cupriavidus Cupriavidus taiwanensis
agagtttgatcctggctcagattgaacgctggcggcatgccttacacatgcaagtcgaacggcagcgcgggcttcggcctggcggcgagtggcgaacgggtgagtaatacatcggaacgtgccctgtcgtgggggataactagtcgaaagattagctaataccgcatacgacctgagggtgaaagcgggggaccggtaacggcctcgcgcgataggagcggccgatgtctgattagctagttggtggggtaaaggcctaccaaggcgacgatcagtagctggtctgagaggacgatcagccacactgggactgagacacggcccagactcctacgggaggcagcagtggggaattttggacaatgggggcaaccctgatccagcaatgccgcgtgtgtgaagaaggccttcgggttgtaaagcacttttgtccggaaagaaatggccctggctaatacccggggtcggtgacggtaccggaagaataagcaccggctaactacgtgccagcagccgcggtaatacgtagggtgcgagcgttaatcggaattactgggcgtaaagcgtgcgcaggcggtttgataagacaggcgtgaaatccccgggctcaacctgggaatggcgcttgtgactgtcaggctagagtgcgtcagaggggggtagaattccacgtgtagcagtgaaatgcgtagagatgtggaggaataccgatggcgaaggcagccccctgggacgtgactgacgctcatgcacgaaagcgtggggagcaaacaggattagataccctggtagtccacgccctaaacgatgtcaactagttgttggggattcatttcttcagtaacgtagctaacgcgtgaagttgaccgcctggggagtacggtcgcaagattaaaactcaaaggaattgacggggacccgcacaagcggtggatgatgtggattaattcgatgcaacgcgaaaaaccttacctacccttgacatgccactaacgaagcagagatgcattaggtgcccgaaagggaaagtggacacaggtgctgcatggctgtcgtcagctcgtgtcgtgagatgttgggttaagtcccgcaacgagcgcaacccttgtctctagttgctacgcaagagcactctagagagactgccggtgacaaaccggaggaaggtggggatgacgtcaagtcctcatggcccttatgggtagggcttcacacgtcatacaatggtgcgtacagagggttgccaacccgcgagggggagctaatcccagaaaacgcatcgtagtccggatcgtagtctgcaactcgactacgtgaagctggaatcgctagtaatcgcggatcagcatgccgcggtgaatacgttcccgggtcttgtacacaccgcccgtcacaccatgggagtgggttttgccagaagtagttagcctaaccgcaaggagggcgattaccacggcagggttcatgactggggtgaagtcgtaacaaggtagccgtatcggaaggtgcggctggatcacctccttaagcttggatcccggg

SEQ ID NO: 95275 - DNA, 1386 bp, Lysobacter capsici
  source 1..1386: mol_type = unassigned DNA
  misc_feature 1..1386: note = AB908111.1.1386 Bacteria Proteobacteria Gammaproteobacteria Xanthomonadales Xanthomonadaceae Lysobacter Lysobacter capsici
cggcagcacagaggagcttgctccttgggtggcgagtggcggacgggtgaggaatacgtcggaatctgcctatttgtgggggataacgtagggaaacttacgctaataccgcatacgacctacgggtgaaagcggaggaccttcgggcttcgcgcagatagatgagccgacgtcggattagctagttggcggggtaaaggcccaccaaggcgacgatccgtagctggtctgagaggatgatcagccacactggaactgagacacggtccagactcctacgggaggcagcagtggggaatattggacaatgggcgcaagcctgatccagccatgccgcgtgtgtgaagaaggccttcgggttgtaaagcacttttgtccggaaagaaaagccttgggttaataccctgaggtcatgacggtaccggaagaataagcaccggctaacttcgtgccagcagccgcggtaatacgaagggtgcaagcgttactcggaattactgggcgtaaagcgtgcgtaggtggtttgttaagtctgatgtgaaagccctgggctcaacctgggaatggcattggaaactggctgactagagtgcggtagagggtagtggaattcccggtgtagcagtgaaatgcgtagatatcgggaggaacatctgtggcgaaggcgactacctggaccagcactgacactgaggcacgaaagcgtggggagcaaacaggattagataccctggtagtccacgccctaaacgatgcgaactggatgttgggagcaacttggctctcagtatcgaagctaacgcgttaagttcgccgcctgggaagtacggtcgcaagactgaaactcaaaggaattgacgggggcccgcacaagcggtggagtatgtggtttaattcgatgcaacgcgaagaaccttacctggccttgacatccacggaactttctagagatagattggtgccttcgggaaccgtgagacaggtgctgcatggctgtcgtcagctcgtgtcgtgagatgttgggttaagtcccgcaacgagcgcaacccttgtccttagttgccagcacgtaatggtgggaactctaaggagaccgccggtgacaaaccggaggaaggtggggatgacgtcaagtcatcatggcccttacggccagggctacacacgtactacaatggtagggacagagggctgcaaacccgcgagggcaagccaatcccagaaaccctatctcagtccggatcggagtctgcaactcgactccgtgaagtcggaatcgctagtaatcgcagatcagcattgctgcggtgaatacgttcccgggccttgtacacaccgcccgtcacaccatgggagtttgttgcaccagaagcaggtagcttaacc

SEQ ID NO: 95276 - DNA, 1454 bp, Piscinibacter aquaticus
  source 1..1454: mol_type = unassigned DNA
  misc_feature 1..1454: note = AB681749.1.1454 Bacteria Proteobacteria Gammaproteobacteria Burkholderiales Comamonadaceae Piscinibacter Piscinibacter aquaticus
attgaacgctggcggcatgccttacacatgcaagtcgaacggtaacgcggggcaacctggcgacgagtggcgaacgggtgagtaatgcatcggaacgtgcccagtagtgggggatagcccggcgaaagccggattaataccgcatacgacctacgggtgaaagggggggatcgcaagacctctcgctattggagcggccgatgtcagattagctagttggtggggtaaaggcctaccaaggcgacgatctgtagctggtctgagaggacgaccagccacactgggactgagacacggcccagactcctacgggaggcagcagtggggaattttggacaatgggggcaaccctgatccagccatgccgcgtgcgggaagaaggccttcgggttgtaaaccgcttttgtcggggaagaaacggtctgcgctaataccgcgggctaatgacggtacccgaagaataagcaccggctaactacgtgccagcagccgcggtaatacgtagggtgcaagcgttaatcggaattactgggcgtaaagcgtgcgcaggcggctttgcaagacagatgtgaaatccccgggctcaacctgggaactgcatttgtgactgcatggctggagtgcggcagaggggggtggaattccgcgtgtagcagtgaaatgcgtagatatgcggaggaacaccgatggcgaaggcaatcccctgggcctgcactgacgctcatgcacgaaagcgtggggagcaaacaggattagataccctggtagtccacgccctaaacgatgtcaactggttgttggacggcttgctgttcagtaacgaagctaacgcgtgaagttgaccgcctggggagtacggccgcaaggttgaaactcaaaggaattgacggggacccgcacaagcggtggatgatgtggtttaattcgatgcaacgcgaaaaaccttacctacccttgacatgccaggaacttgccagagatggcttggtgctcgaaagagaacctggacacaggtgctgcatggccgtcgtcagctcgtgtcgtgagatgttgggttaagtcccgcaacgagcgcaacccttatcattagttgctacgcaagggcactctaatgagactgccggtgacaaaccggaggaaggtggggatgacgtcaggtcatcatggcccttatgggtagggctacacacgtcatacaatggccggtacagagggctgccaacccgcgagggggagctaatctcagaaaaccggtcgtagtccggatcgcagtctgcaactcgactgcgtgaagtcggaatcgctagtaatcgcggatcagcttgccgcggtgaatacgttcccgggtcttgtacacaccgcccgtcacaccatgggagcgggttctgccagaagtagttagcctaaccgcaaggggggcgattaccacggcagggttcgtgactggggtgaag

SEQ ID NO: 95277 - DNA, 1316 bp, Alicycliphilus denitrificans
  source 1..1316: mol_type = unassigned DNA
  misc_feature 1..1316: note = AB908107.1.1316 Bacteria Proteobacteria Gammaproteobacteria Burkholderiales Comamonadaceae Alicycliphilus Alicycliphilus denitrificans
cttcggatgctgacgagtggcgaacgggtgagtaatacatcggaacgtgcccgatcgtgggggataacgaagcgaaagctttgctaataccgcatacgatctacggatgaaagcgggggatcttcggacctcgcgcggacggagcggccgatggcagattaggtagttggtgggataaaagcttaccaagccgacgatctgtagctggtctgagaggatgatcagccacactgggactgagacacggcccagactcctacgggaggcagcagtggggaattttggacaatgggcgcaagcctgatccagccatgccgcgtgcaggatgaaggccttcgggttgtaaactgcttttgtacggaacgaaaaggtgccttctaataaagggcgctcatgacggtaccgtaagaataagcaccggctaactacgtgccagcagccgcggtaatacgtagggtgcgagcgttaatcggaattactgggcgtaaagcgtgcgcaggcggttttgtaagacagaggtgaaatccccgggctcaacctgggaactgcctttgtgactgcaaggctggagtgcggcagagggggatggaattccgcgtgtagcagtgaaatgcgtagatatgcggaggaacaccgatggcgaaggcaatcccctgggcctgcactgacgctcatgcacgaaagcgtggggagcaaacaggattagataccctggtagtccacgccctaaacgatgtcaactggttgttggggattaattttctcagtaacgaagctaacgcgtgaagttgaccgcctggggagtacggccgcaaggttgaaactcaaaggaattgacggggacccgcacaagcggtggatgatgtggtttaattcgatgcaacgcgaaaaaccttacccacctttgacatgtatggaatcccgaagagatttgggagtgctcgaaagagagccataacacaggtgctgcatggctgtcgtcagctcgtgtcgtgagatgttgggttaagtcccgcaacgagcgcaacccttgccattagttgctacgaaagggcactctaatgggactgccggtgacaaaccggaggaaggtggggatgacgtcaagtcctcatggcccttataggtggggctacacacgtcatacaatggctggtacagagggtagccaacccgcgagggggagccaatcccacaaagccagtcgtagtccggatcgcagtctgcaactcgactgcgtgaagtcggaatcgctagtaatcgcggatcagaatgtcgcggtgaatacgttcccgggtcttgtacacaccgcccgt

SEQ ID NO: 95278 - DNA, 1475 bp, Variovorax boronicumulans
  source 1..1475: mol_type = unassigned DNA
  misc_feature 1..1475: note = AB300597.1.1475 Bacteria Proteobacteria Gammaproteobacteria Burkholderiales Comamonadaceae Variovorax Variovorax boronicumulans
tgaacgctggcggcatgccttacacatgcaagtcgaacggcagcgcgggagcaatcctggcggcgagtggcgaacgggtgagtaatacatcggaacgtgcccaatcgtgggggataacgcagcgaaagctgtgctaataccgcatacgatctacggatgaaagcaggggatcgcaagaccttgcgcgaatggagcggccgatggcagattaggtagttggtgaggtaaaggctcaccaagccttcgatctgtagctggtctgagaggacgaccagccacactgggactgagacacggtccagactcctacgggaggcagcagtggggaattttggacaatgggcgaaagcctgatccagccatgccgcgtgcaggatgaaggccttcgggttgtaaactgcttttgtacggaacgaaacggtcttttctaatacagaaggctaatgacggtaccgtaagaataagcaccggctaactacgtgccagcagccgcggtaatacgtagggtgcaagcgttaatcggaattactgggcgtaaagcgtgcgcaggcggttatgtaagacagttgtgaaatccccgggctcaacctgggaactgcatctgtgactgcatagctagagtacggtagagggggatggaattccgcgtgtagcagtgaaatgcgtagatatgcggaggaacaccgatggcgaaggcaatcccctggacctgtactgacgctcatgcacgaaagcgtggggagcaaacaggattagataccctggtagtccacgccctaaacgatgtcaactggttgttgggtcttcactgactcagtaacgaagctaacgcgtgaagttgaccgcctggggagtacggccgcaaggttgaaactcaaaggaattgacggggacccgcacaagcggtggatgatgtggtttaattcgatgcaacgcgaaaaaccttacccacctttgacatgtacggaattcgccagagatggcttagtgctcgaaagagaaccgtaacacaggtgctgcatggctgtcgtcagctcgtgtcgtgagatgttgggttaagtcccgcaacgagcgcaacccttgtcattagttgctacattcagttgggcactctaatgagactgccggtgacaaaccggaggaaggtggggatgacgtcaagtcctcatggcccttataggtggggctacacacgtcatacaatggctggtacaaagggttgccaacccgcgagggggagctaatcccataaaaccagtcgtagtccggatcgcagtctgcaactcgactgcgtgaagtcggaatcgctagtaatcgtggatcagaatgtcacggtgaatacgttcccgggtcttgtacacaccgcccgtcacaccatgggagcgggttctgccagaagtagttagcttaaccgcaaggagggcgattaccacggcagggttcgtgactggggtgaagtcgtaacaaggtagcca

SEQ ID NO: 95279 - DNA, 725 bp, Acinetobacter calcoaceticus
  source 1..725: mol_type = unassigned DNA
  misc_feature 1..725: note = AB542935.1.725 Bacteria Proteobacteria Gammaproteobacteria Pseudomonadales Moraxellaceae Acinetobacter Acinetobacter calcoaceticus
cggacgggtgagtaatgcttaggaatctgcctattagtgggggacaacatttcgaaaggaatgctaataccgcatacgtcctacgggagaaagcaggggatcttcggaccttgcgctaatagatgagcctaagtcggattagctagttggtggggtaaaggcctaccaaggcgacgatctgtagcgggtctgagaggatgatccgccacactgggactgagacacggcccagactcctacgggaggcagcagtggggaatattggacaatgggcgcaagcctgatccagccatgccgcgtgtgtgaagaaggccttatggttgtaaagcactttaagcgaggaggaggctactttagataatacctagagatagtggacgttactcgcagaataagcaccggctaactctgtgccagcagccgcggtaatacagagggtgcaagcgttaatcggatttactgggcgtaaagcgcgcgtaggcggctaattaagtcaaatgtgaaatccccgagcttaacttgggaattgcattcgatactggttagctagagtgtgggagaggatggtagaattccaggtgtagcggtgaaatgcgtagagatctggaggaataccgatggcgaaggcagccatctggcctaacactgacgctgaggtgcgaaagcatggggagcaaaacaggattagataccctggtagtccatgccgtaaacgatgtctacta

SEQ ID NO: 95280 - DNA, 1472 bp, Xanthomonas campestris
  source 1..1472: mol_type = unassigned DNA
  misc_feature 1..1472: note = AB680404.1.1472 Bacteria Proteobacteria Gammaproteobacteria Xanthomonadales Xanthomonadaceae Xanthomonas Xanthomonas campestris
agtgaacgctggcggcaggcctaacacatgcaagtcgaacggcagcacagtaagagcttgctcttatgggtggcgagtggcggacgggtgaggaatacatcggaatctactctttcgtgggggataacgtagggaaacttacgctaataccgcatacgacctacgggtgaaagcggaggaccttcgggcttcgcgcgattgaatgagccgatgtcggattagctagttggcggggtaaaggcccaccaaggcgacgatccgtagctggtctgagaggatgatcagccacactggaactgagacacggtccagactcctacgggaggcagcagtggggaatattggacaatgggcgcaagcctgatccagccatgccgcgtgggtgaagaaggccttcgggttgtaaagcccttttgttgggaaagaaaagcagtcggttaatacccgattgttctgacggtacccaaagaataagcaccggctaacttcgtgccagcagccgcggtaatacgaagggtgcaagcgttactcggaattactgggcgtaaagcgtgcgtaggtggtggtttaagtctgttgtgaaagccctgggctcaacctgggaattgcagtggatactgggtcactagagtgtggtagagggtagcggaattcccggtgtagcagtgaaatgcgtagagatcgggaggaacatccgtggcgaaggcggctacctggaccaacactgacactgaggcacgaaagcgtggggagcaaacaggattagataccctggtagtccacgccctaaacgatgcgaactggatgttgggtgcaatttggcacgcagtatcgaagctaacgcgttaagttcgccgcctggggagtacggtcgcaagactgaaactcaaaggaattgacgggggcccgcacaagcggtggagtatgtggtttaattcgatgcaacgcgaagaaccttacctggtcttgacatccacggaactttccagagatggattggtgccttcgggaaccgtgagacaggtgctgcatggctgtcgtcagctcgtgtcgtgagatgttgggttaagtcccgcaacgagcgcaacccttgtccttagttgccagcacgtaatggtgggaactctaaggagaccgccggtgacaaaccggaggaaggtggggatgacgtcaagtcatcatggcccttacgaccagggctacacacgtactacaatggtagggacagagggctgcaaacccgcgagggtaagccaatcccagaaaccctatctcagtccggattggagtctgcaactcgactccatgaagtcggaatcgctagtaatcgcagatcagcattgctgcggtgaatacgttcccgggccttgtacacaccgcccgtcacaccatgggagtttgttgcaccagaagcaggtagcttaaccttcgggagggcgcttgccacggtgtggccgatgactggggtgaag

SEQ ID NO: 95281 - DNA, 1458 bp, unidentified; identical to SEQ ID NO: 246
  source 1..1458: mol_type = unassigned DNA; note = Noviherbaspirillum massiliense
  misc_feature 1..1458: note = AB542397.1.1458 Bacteria Proteobacteria Gammaproteobacteria Burkholderiales Oxalobacteraceae Noviherbaspirillum Noviherbaspirillum massiliense

SEQ ID NO: 95282 - DNA, 1501 bp, Xanthomonas axonopodis
  source 1..1501: mol_type = unassigned DNA
  misc_feature 1..1501: note = AB101445.1.1501 Bacteria Proteobacteria Gammaproteobacteria Xanthomonadales Xanthomonadaceae Thermomonas Xanthomonas axonopodis
gagtttgatcctggctcagagtgaacgctggcggcaggcctaatacatgcaagtcgaacggcagcacagtggagcttgctccatgggtggcgagtggcggacgggtgaggaatacatgggaatctgcccagtcgtgggggataacgtatggaaacgtacgctaataccgcatgcgcccttcgggggaaagtcggggaccgcaaggcctgacgcgattggatgagcccatgttcgattagctagttggcggggtaacggcccaccaaggcgacgatcgatagctggtctgagaggatgatcagccacactggaactgagacacggtccagactcctacgggaggcagcagtagggaatattggacaatgggcgcaagcctgatccagccatgccgcgtgagtgaagaaggccctcgggttgtaaagctcttttgttggggaagaaaagcagttggttaatacccgattgttctgacggtacccaaagaataagcaccggctaacttcgtgccagcagccgcggtaatacgaagggtgcaagcgttactcggaattactgggcgtaaagcgtgcgtaggtggttgtttaagtctgatgtgaaagccctgggctcaacctgggaatggcattggatactggatagctagagtgcggtagagggtagtggaattcccggtgtagcagtgaaatgcgtagagatcgggaggaacatccgtggcgaaggcgactacctgggccagcactgacactgaggcacgaaagcgtggggagcaaacaggattagataccctggtagtccacgccctaaacgatgcgaactggatgttgggctcaacttggagctcagtatcgaagctaacgcgttaagttcgccgcctggggagtacggtcgcaagactgaaactcaaaggaattgacgggggcccgcacaagcggtggagtatgtggtttaattcgatgcaacgcgaagaaccttacctggccttgacatgcacggaatcctttagagatagaggagtgccttcgggaaccgtgacacaggtgctgcatggctgtcgtcagctcgtgtcgtgagatgttgggttaagtcccgcaacgagcgcaacccttgtccttagttgccagcacgtaatggtgggaactctaaggagaccgccggtgacaaaccggaggaaggtggggatgacgtcaagtcatcatggcccttacggccagggctacacacgtactacaatggtggggacagagggctgcaagcgcgcgagcgtgagccaatcccagaaaccccatctcagtccggattggagtctgcaactcgactccatgaagtcggaatcgctagtaatcgcagatcagcattgctgcggtgaatacgttcccgggccttgtacacaccgcccgtcacaccatgggagtttgttgcaccagaagcaggtagcttaaccttcgggggggcgcttgccacggtgtggccgatgactggggtgaagtcgtaacaaggt

SEQ ID NO: 95283 - DNA, 1487 bp, unidentified
  source 1..1487: mol_type = unassigned DNA; note = Paraburkholderia terrae
  misc_feature 1..1487: note = AB201284.1.1487 Bacteria Proteobacteria Gammaproteobacteria Burkholderiales Burkholderiaceae Burkholderia-Caballeronia-Paraburkholderia Paraburkholderia terrae
ctgagttttaatctggctcagattgaacgctggcggcatgccttacacatgcaagtcgaacggcagcgcgggggcaaccctggyggcgagtggcgaacgggtgagtaatacatcggaacgtgtcctggagtgggggatagcccggcgaaagccggattaataccgcatacgatctcaggatgaaagcgggggaccgaaaggcctcgcgctcaaggggcggccgatggcagattagctagttggtggggtaaaggcctaccaaggcgacgatctgtagctggtctgagaggacgaccagccacactgggactgagacacggcccagactcctacgggaggcagcagtggggaattttggacaatgggggcaaccctgatccagcaatgccgcgtgtgtgaagaaggccttcgggttgtaaagcacttttgtccggaaagaaaacctccgtcctaatacggtggggggatgacggtaccggaagaataagcaccggctaactacgtgccagcagccgcggtaatacgtagggtgcaagcgttaatcggaattactgggcgtaaagcgtgcgcaggcggttcgctaagaccgatgtgaaatccccgggcttaacctgggaactgcattggtgactggcgggctagagtatggcagaggggggtagaattccacgtgtagcagtgaaatgcgtagagatgtggaggaataccgatggcgaaggcagccccctgggccaatactgacgctcatgcacgaaagcgtggggagcaaacaggattagataccctggtagtccacgccctaaacgatgtcaactagttgtcgggtcttcattgacttggtaacgaagctaacgcgtgaagttgaccgcctggggagtacggtcgcaagattaaaactcaaaggaattgacggggacccgcacaagcggtggatgatgtggattaattcgatgcaacgcgaaaaaccttacctacccttgacatgtacggaaccttgccgagaggtgagggtgcccgaaagggagccgtaacacaggtgctgcatggctgtcgtcagctcgtgtcgtgagatgttgggttaagtcccgcaacgagcgcaacccttgtccctagttgctacgcaagagcactctagggagactgccggtgacaaaccggaggaaggtggggatgacgtcaagtcctcatggcccttatgggtagggcttcacacgtcatacaatggtcggaacagagggttgccaagccgcgaggtggagccaatcccagaaaaccgatcgtagtccggatcgcagtctgcaactcgactgcgtgaagctggaatcgctagtaatcgcggatcagcatgccgcggtgaatacgttcccgggtcttgtacacaccgcccgtcacaccatgggagtgggttttaccagaagtggctagtctaaccgcaaggaggacggtcaccacggtaggattcatgactggggtgaagtcgtacaggg

SEQ ID NO: 95284 - DNA, 1195 bp, Burkholderia cenocepacia
  source 1..1195: mol_type = unassigned DNA
  misc_feature 1..1195: note = AB272319.1.1195 Bacteria Proteobacteria Gammaproteobacteria Burkholderiales Burkholderiaceae Burkholderia-Caballeronia-Paraburkholderia Burkholderia cenocepacia
tgagtaatacatcggaacatgtcctgtagtgggggatagcccggcgaaagccggattaataccgcatacgatctacggatgaaagcgggggaccttcgggcctcgcgctatagggttggccgatggctgattagctagttggtggggtaaaggcctaccaaggcgacgatcagtagctggtctgagaggacgaccagccacactgggactgagacacggcccagactcctacgggaggcagcagtggggaattttggacaatgggcgaaagcctgatccagcaatgccgcgtgtgtgaagaaggccttcgggttgtaaagcacttttgtccggaaagaaatccttggctctaatacagtcgggggatgacggtaccggaagaataagcaccggctaactacgtgccagcagccgcggtaatacgtagggtgcgagcgttaatcggaattactgggcgtaaagcgtgcgcaggcggtttgctaagaccgatgtgaaatccccgggctcaacctgggaactgcattggtgactggcaggctagagtatggcagaggggggtagaattccacgtgtagcagtgaaatgcgtagagatgtggaggaataccgatggcgaaggcagccccctgggccaatactgacgctcatgcacgaaagcgtggggagcaaacaggattagataccctggtagtccacgccctaaacgatgtcaactagttgttggggattcatttccttagtaacgtagctaacgcgtgaagttgaccgcctggggagtacggtcgcaagattaaaactcaaaggaattgacggggacccgcacaagcggtggatgatgtggattaattcgatgcaacgcgaaaaaccttacctacccttgacatggtcggaatcctgccgagaggtgggagtgctcgaaagagaaccggcgcacaggtgctgcatggctgtcgtcagctcgtgtcgtgagatgttgggttaagtcccgcaacgagcgcaacccttgtccttagttgctacgcaagagcactctaaggagactgccggtgacaaaccggaggaaggtggggatgacgtcaagtcctcatggcccttatgggtagggcttcacacgtcatacaatggtcggaacagagggttgccaacccgcgagggggagctaatcccagaaaaccgatgcgtagtgccggattgca

SEQ ID NO: 95285 - DNA, 1435 bp, unidentified
  source 1..1435: mol_type = unassigned DNA; note = Methylorubrum extorquens
  misc_feature 1..1435: note = AB175630.1.1435 Bacteria Proteobacteria Alphaproteobacteria Rhizobiales Beijerinckiaceae Methylobacterium-Methylorubrum Methylorubrum extorquens
cgaacgctggcggcaggcttaacacatgcaagtcgaacgggcaccttcgggtgtcagtggcagacgggtgagtaacacgtgggaacgtacccttcggttcggaataactcagggaaacttgagctaataccggatacgcccttatggggaaaggtttactgccgaaggatcggcccgcgtctgattagcttgttggtggggtaacggcctaccaaggcgacgatcagtagctggtctgagaggatgatcagccacactgggactgagacacggcccagactcctacgggaggcagcagtggggaatattggacaatgggcgcaagcctgatccagccatgccgcgtgagtgatgaaggccttagggttgtaaagctcttttgtccgggacgataatgacggtaccggaagaataagccccggctaacttcgtgccagcagccgcggtaatacgaagggggctagcgttgctcggaatcactgggcgtaaagggcgcgtaggcggccgattaagtcgggggtgaaagcctgtggctcaaccacagaattgccttcgatactggttggcttgagaccggaagaggacagcggaactgcgagtgtagaggtgaaattcgtagatattcgcaagaacaccagtggcgaaggcggctgtctggtccggttctgacgctgaggcgcgaaagcgtggggagcaaacaggattagataccctggtagtccacgccgtaaacgatgaatgccagccgttggcctgcttgcaggtcagtggcgccgctaacgcattaagcattccgcctggggagtacggtcgcaagattaaaactcaaaggaattgacgggggcccgcacaagcggtggagcatgtggtttaattcgaagcaacgcgcagaaccttaccatcccttgacatggcatgttacctcgagagatcggggatcctcttcggaggcgtgcacacaggtgctgcatggctgtcgtcagctcgtgtcgtgagatgttgggttaagtcccgcaacgagcgcaacccacgtccttagttgccatcattcagttgggcactctagggagactgccggtgataagccgcgaggaaggtgtggatgacgtcaagtcctcatggcccttacgggatgggctacacacgtgctacaatggcggtgacagtgggacgcgaagccgcgaggtggagcaaatccccaaaaaccgtctcagttcggattgcactctgcaactcgggtgcatgaaggcggaatcgctagtaatcgtggatcagcacgccacggtgaatacgttcccgggccttgtacacaccgcccgtcacaccatgggagttggtcttacccgacggcgctgcgccaaccgcaaggaggcaggcgaccacggtagggtcagcgactggggtgaagtcgtaacaaggtagccgtaggggaacc

SEQ ID NO: 95286 - DNA, 1468 bp, Ralstonia pickettii
  source 1..1468: mol_type = unassigned DNA
  misc_feature 1..1468: note = AB004790.1.1468 Bacteria Proteobacteria Gammaproteobacteria Burkholderiales Burkholderiaceae Ralstonia Ralstonia pickettii
  misc_difference 836: note = n is a, c, g, or t
gctcagattgaacgctggcggcatgcttacacatgcaagtcgaacggcagcatgatctagcttgctagattgatggcgagtggcgaacgggtgagtaatacatcggaacgtgccctgtagtgggggataactagtcgaaagattagctaataccgcatacgacctgagggtgaaagtgggggaccgcaaggcctcatgctataggagcggccgatgtctgattagctagttggtggggtaaaggcccaccaaggcgacgatcagtagctggtctgagaggacgatcagccacactgggactgagacacggcccagactcctacgggaggcagcagtggggaattttggacaatgggcgaaactgatccagcaatgccgcgtgtgtgaagaaggccttcgggttgtaaagcacttttgtccggaaagaaatggctctggttaatacctggggtcgatgacggtaccggaagaataaggaccggctaactacgtgccagcagccgcggtaatacgtagggtccaagcgttaatcggaattactgggcgtaaagcgtgcgcaggcggttgtgcaagaccgatgtgaaatccccgagcttaacttgggaattgcattggtgactgcacggctagagtgtgtcagaggggggtagaattccacgtgtagcagtgaaatgcgtagagatgtggaggaataccgatggcgaaggcagccccctgggataacactgacgctcatgcacgaaagcgtggggagcaaacaggattagataccctggtagtccacgccctaaacgatgtcaactagttgttggggattcatttccttagtaacgtantaacgcgtgaagttgaccgcctggggagtacggtcgcaagattaaaactcaaaggaattgacggggacccgcacaagcggtggatgatgtggattaattcgatgcaacgcgaaaaaccttacctacccttgacatgccactaacgaagcagagatgcattaggtgctcgaaagagaaagtggacacaggtgctgcatggctgtcgtcagctcgtgtcgtgagatgttgggttaagtcccgcaacgagcgcaacccttgtctctagttgctacgaaagggcactctagagagactgccggtgacaaaccggaggaaggtggggatgacgtcaagtcctcatggcccttatgggtagggcttcacacgtcatacaatggtgcatacagagggttgccaagccgcgaggtggagctaatcccagaaaatgcatcgtagtccggatcgtagtctgcaactcgactacgtgaagctggaatcgctagtaatcgcggatcagcatgccgcggtgaatacgttcccgggtcttgtacacaccgcccgtcacaccatgggagtgggctttaccagaagtagttagcctaacccgcaacggagggcgattaccaccggtagggttcatgactcggggtgag

SEQ ID NO: 95287 - DNA, 1503 bp, Janthinobacterium lividum
  source 1..1503: mol_type = unassigned DNA
  misc_feature 1..1503: note = AB021388.1.1503 Bacteria Proteobacteria Gammaproteobacteria Burkholderiales Oxalobacteraceae Janthinobacterium Janthinobacterium lividum
  misc_difference 842..843: note = n is a, c, g, or t
  misc_difference 1110: note = n is a, c, g, or t
  misc_difference 1154..1160: note = n is a, c, g, or t
ttgatcctggctcagattgaacgctggcggcatgccttacacatgcaagtcgaacggcagcacggagcttgctctggtggcgagtggcgaacgggtgagtaatatatcggaacgtaccctagagtgggggataacgtagcgaaagttacgctaataccgcatacgatctaaggatgaaagtgggggatcgcaagacctcatgctcgtggagcggccgatatctgattagctagttggtagggtaaaagcctaccaaggcatcgatcagtagctggtctgagaggacgaccagccacactggaactgagacacggtccagactcctacgggaggcagcagtggggaattttggacaatgggcgaaagcctgatccagcaatgccgcgtgagtgaagaaggccttcgggttgtaaagctcttttgtcagggaagaaacggtgagagctaatatctcttgctaatgacggtacctgaagaataagcaccggctaactacgtgccagcagccgcggtaatacgtagggtgcaagcgttaatcggaattactgggcgtaaagcgtgcgcaggcggttttgtaagtctgatgtgaaatccccgggctcaacctgggaattgcattggagactgcaaggctagaatctggcagaggggggtagaattccacgtgtagcagtgaaatgcgtagatatgtggaggaacaccgatggcgaaggcagccccctgggtcaagattgacgctcatgcacgaaagcgtggggagcaaacaggattagataccctggtagtccacgccctaaacgatgtctactagttgtcgggtcttaattgacttggtaacgcanntaacgcgtgaagtagaccgcctggggagtacggtcgcaagattaaaactcaaaggaattgacggggacccgcacaagcggtggatgatgtggattaattcgatgcaacgcgaaaaaccttacctacccttgacatggctggaatccttgagagatcagggagtgctcgaaagagaaccagtacacaggtgctgcatggctgtcgtcagctcgtgtcgtgagatgttgggttaagtcccgcaacgagcgcaacccttgtcattagttnctacgaaagggcactctaatgagactgccggtgacaaaccggannnnnnnggggatgacgtcaagtcctcatggcccttatgggtagggcttcacacgtcatacaatggtacatacagagcgccgccaacccgcgagggggagctaatcgcagaaagtgtatcgtagtccggattgtagtctgcaactcgactgcatgaagttggaatcgctagtaatcgcggatcagcatgtcgcggtgaatacgttcccgggtcttgtacacaccgcccgtcacaccatgggagcgggttttaccagaagtaggtagcttaaccgtaaggagggcgcttaccacggtaggattcgtgactggggtgaagtcgtaacaaggtagccgtatcggaaggtgcgg

SEQ ID NO: 95288 - DNA, 1506 bp, Pseudomonas fluorescens
  source 1..1506: mol_type = unassigned DNA
  misc_feature 1..1506: note = AB091837.1.1506 Bacteria Proteobacteria Gammaproteobacteria Enterobacterales Yersiniaceae Serratia Pseudomonas fluorescens
tgaagagtttgatcatggctcagattgaacgctggcggcaggcttaacacatgcaagtcgagcggtagcacaggggagcttgctccctgggtgacgagcggcggacgggtgagtaatgtctgggaaactgcctgatggagggggataactactggaaacggtagctaataccgcataacgtcgcaagaccaaagagggggaccttcgggcctcttgccatcagatgtgcccagatgggattagctagtaggtggggtaatggctcacctaggcgacgatccctagctggtctgagaggatgaccagccacactggaactgagacacggtccagactcctacgggaggcagcagtggggaatattgcacaatgggcgcaagcctgatgcagccatgccgcgtgtgtgaagaaggccttcgggttgtaaagcactttcagcgaggaggaaggtggtgagcttaatacgctcatcaattgacgttactcgcagaagaagcaccggctaactccgtgccagcagccgcggtaatacggagggtgcaagcgttaatcggaattactgggcgtaaagcgcacgcaggcggtttgttaagtcagatgtgaaatccccgggctcaacctgggaactgcatttgaaactggcaagctagagtctcgtagaggggggtagaattccaggtgtagcggtgaaatgcgtagagatctggaggaataccggtggcgaaggcggccccctggacgaagactgacgctcaggtgcgaaagcgtggggagcaaacaggattagataccctggtagtccacgctgtaaacgatgtcgatttggaggttgtgcccttgaggcgtggcttccggagctaacgcgttaaatcgaccgcctggggagtacggccgcaaggttaaaactcaaatgaattgacgggggcccgcacaagcggtggagcatgtggtttaattcgatgcaacgcgaagaaccttacctactcttgacatccagagaactttccagagatggattggtgccttcgggaactctgagacaggtgctgcatggctgtcgtcagctcgtgttgtgaaatgttgggttaagtcccgcaacgagcgcaacccttatcctttgttgccagcggttcggccgggaactcaaaggagactgccagtgataaactggaggaaggtggggatgacgtcaagtcatcatggcccttacgagtagggctacacacgtgctacaatggcgtatacaaagagaagcgacctcgcgagagcaagcggacctcataaagtacgtcgtagtccggattggagtctgcaactcgactccatgaagtcggaatcgctagtaatcgtagatcagaatgctacggtgaatacgttcccgggccttgtacacaccgcccgtcacaccatgggagtgggttgcaaaagaagtaggtagcttaaccttcgggagggcgcttaccactttgtgattcatgactggggtgaagtcgtaacaaggtaacc

SEQ ID NO: 95289 - DNA, 1474 bp, Comamonas testosteroni
  source 1..1474: mol_type = unassigned DNA
  misc_feature 1..1474: note = AB007996.1.1474 Bacteria Proteobacteria Gammaproteobacteria Burkholderiales Comamonadaceae Comamonas Comamonas testosteroni
tttgatcctggctcagattgaacgctggcggcatgctttacacatgcaagtcgaacggtaacaggtcttcggatgctgacgagtggcgaacgggtgagtaatacatcggaacgtgcctagtagtgggggataactactcgaaagagtagctaataccgcatgagatctacggatgaaagcaggggaccttcgggccttgtgctactagagcggctgatggcagattaggtagttggtggggtaaaggcttaccaagcctgcgatctgtagctggtctgagaggacgaccagccacactgggactgagacacggcccagactcctacgggaggcagcagtggggaattttggacaatgggcgaaagcctgatccagcaatgccgcgtgcaggatgaaggccctcgggttgtaaactgcttttgtacggaacgaaaagcctggggctaatatccccgggtcatgacggtaccgtaagaataagcaccggctaactacgtgccagcagccgcggtaatacgtagggtgcaagcgttaatcggaattactgggcgtaaagcgtgcgcaggcggttttgtaagacagtggtgaaatccccgggctcaacctgggaactgccattgtgactgcaaggctagagtgcggcagagggggatggaattccgcgtgtagcagtgaaatgcgtagatatgcggaggaacaccgatggcgaaggcaatcccctgggcctgcactgacgctcatgcacgaaagcgtggggagcaaacaggattagataccctggtagtccacgccctaaacgatgtcaactggttgttgggtcttaactgactcagtaacgaagctaacgcgtgaagttgaccgcctggggagtacggccgcaaggttgaaactcaaaggaattgacggggacccgcacaagcggtggatgatgtggtttaattcgatgcaacgcgaaaaaccttacccacctttgacatggcaggaacttaccagagatggtttggtgctcgaaagagaacctgcacacaggtgctgcatggctgtcgtcagctcgtgtcgtgagatgttgggttaagtcccgcaacgagcgcaacccttgccattagttgctacattcagttgagcactctaatgggactgccggtgacaaaccggaggaaggtggggatgacgtcaagtcctcatggcccttataggtggggctacacacgtcatacaatggctggtacaaagggttgccaacccgcgagggggagctaatcccataaagccagtcgtagtccggatcgcagtctgcaactcgactgcgtgaagtcggaatcgctagtaatcgtggatcagaatgtcacggtgaatacgttcccgggtcttgtacacaccgcccgtcacaccatgggagcgggtctcgccagaagtaggtagcctaaccgtaaggagggcgcttaccacggcggggttcgtgactggggtgaag

SEQ ID NO: 95290 - DNA, 1546 bp, unidentified
  source 1..1546: mol_type = unassigned DNA; note = Rhodanobacter denitrificans
  misc_feature 1..1546: note = AJXV01000059.262.1807 Bacteria Proteobacteria Gammaproteobacteria Xanthomonadales Rhodanobacteraceae Rhodanobacter Rhodanobacter denitrificans
taagtgaagagtttgatcctggctcagattgaacgctggcggcatgcctaacacatgcaagtcgaacggcagcacagaggagcttgctccttgggtggcgagtggcggacgggtgagtaatgcatcgggatctaccctgacgtgggggataacctcgggaaaccgggactaataccgcatacgtcctacgggagaaagcgggggaccttcgggcctcgcgcggcaggacgaaccgatgtgcgattagctagttggcggggtaatggcccaccaaggcgacgatcgctagctggtctgagaggatgatcagccacactgggactgagacacggcccagactcctacgggaggcagcagtggggaatattggacaatgggcgcaagcctgatccagcaatgccgcgtgtgtgaagaaggccttcgggttgtaaagcacttttatcaggagcgaaataccacgggttaataccctatggggctgacggtacctgaggaataagcaccggctaacttcgtgccagcagccgcggtaatacgaagggtgcaagcgttaatcggaattactgggcgtaaagggtgcgtaggcggttacttaagtctgtcgtgaaatccccgggctcaacctgggaatggcgatggatactgggtggctagagtgtgtcagaggatggtggaattcccggtgtagcggtgaaatgcgtagagatcgggaggaacatcagtggcgaaggcggccatctgggacaacactgacgctgaagcacgaaagcgtggggagcaaacaggattagataccctggtagtccacgccctaaacgatgcgaactggatgttggtctcaactcggagatcagtgtcgaagctaacgcgttaagttcgccgcctggggagtacggtcgcaagactgaaactcaaaggaattgacgggggcccgcacaagcggtggagtatgtggtttaattcgatgcaacgcgaagaaccttacctggccttgacatgtccggaatcctgcagagatgcgggagtgccttcgggaatcggaacacaggtgctgcatggctgtcgtcagctcgtgtcgtgagatgttgggttaagtcccgcaacgagcgcaacccttgtccttagttgccagcacgtaatggtgggaactctaaggagactgccggtgacaaaccggaggaaggtggggatgacgtcaagtcatcatggcccttacggccagggctacacacgtactacaatggtcggtacagagggttgcaagaccgcgaggtggagccaatcccagaaagccgatcccagtccggattggagtctgcaactcgactccatgaagtcggaatcgctagtaatcgcggatcagctatgccgcggtgaatacgttcccgggccttgtacacaccgcccgtcacaccatgggagtgggttgctccagaaggcgttagtctaaccgcaagggggacgacgcccacggagtggtccatgactggggtgaagtcgtaacaaggtagccgtatcggaaggtgcggctggatcacctcctttc

SEQ ID NO: 95291 - DNA, 1449 bp, Klebsiella pneumoniae
  source 1..1449: mol_type = unassigned DNA
  misc_feature 1..1449: note = AB004753.1.1449 Bacteria Proteobacteria Gammaproteobacteria Enterobacterales Enterobacteriaceae Klebsiella Klebsiella pneumoniae
  misc_difference 149: note = n is a, c, g, or t
acgctggcggcaggcctaacacatgcaagtcgagcggtagcacagagagcttgctctcgggtgacgagcggcggacgggtgagtaatgtctgggaaactgcctgatggagggggataactactggaaacggtagctaataccgcataangtcgcaagaccaaagtgggggaccttcgggcctcatgccatcagatgtgcccagatgggattagctagtaggtggggtaacggctcacctaggcgacgatccctagctggtctgagaggatgaccagccacactggaactgagacacggtccagactcctacgggaggcagcagtggggaatattgcacaatgggcgcaagcctgatgcagccatgccgcgtgtgtgaagaaggccttcgggttgtaaagcactttcagcggggaggaaggcgatgaggttaataacctcatcgattgacgttacccgcagaagaagcaccggctaactccgtgccagcagccgcggtaatacggagggtgcaagcgttaatcggaattactgggcgtaaagcgcacgcaggcggtctgtcaagtcggatgtgaaatccccgggctcaacctgggaactgcattcgaaactggcaggctagagtcttgtagaggggggtagaattccaggtgtagcggtgaaatgcgtagagatctggaggaataccggtggcgaaggcggccccctggacaaagactgacgctcaggtgcgaaagcgtggggagcaaacaggattagataccctggtagtccacgccgtaaacgatgtcgatttggaggttgtgcccttgaggcgtggcttccggagctaacgcgttaaatcgaccgcctggggagtacggccgcaaggttaaaactcaaatgaattgacgggggcccgcacaagcggtggagcatgtggtttaattcgatgcaacgcgaagaaccttacctggtcttgacatccacagaactttccagagatggattggtgccttcgggaactgtgagacaggtgctgcatggctgtcgtcagctcgtgttgtgaaatgttgggttaagtcccgcaacgagcgcaacccttatcctttgttgccagcggttaggccgggaactcaaaggagactgccagtgataaactggaggaaggtggggatgacgtcaagtcatcatggcccttacgaccagggctacacacgtgctacaatggcatatacaaagagaagcgacctcgcgagagcaagcggacctcataaagtatgtcgtagtccggattggagtctgcaactcgactccatgaagtcggaatcgctagtaatcgtagatcagaatgctacggtgaatacgttcccgggccttgtacacaccgcccgtcacaccatgggagtgggttgcaaaagaagtaggtagcttaaccttcgggagggcgcttaccactttgtgattcatga

SEQ ID NO: 95292 - protein, 24 aa, Acinetobacter calcoaceticus
  REGION 1..24: note = sp|P27532|PQQA_ACICA Coenzyme PQQ synthesis protein A OS=Acinetobacter calcoaceticus OX=471 GN=pqqA PE=1 SV=1
MQWTKPAFTDLRIGFEVTMYFEAR

SEQ ID NO: 95293 - protein, 29 aa, unidentified
  source 1..29: note = Methylorubrum extorquens
  REGION 1..29: note = sp|Q49148|PQQA_METEA Coenzyme PQQ synthesis protein A OS=Methylorubrum extorquens (strain ATCC 14718 / DSM 1338 / JCM 2805 / NCIMB 9133 / AM1) OX=272630 GN=pqqA; PE = 3SV=1
MKWAAPIVSEICVGMEVTSYESAEIDTFN

SEQ ID NO: 95294 - protein, 23 aa, Klebsiella pneumoniae
  REGION 1..23: note = sp|P27503|PQQA_KLEPN Coenzyme PQQ synthesis protein A OS=Klebsiella pneumoniae OX=573 GN=pqqA PE=3 SV=1
MWKKPAFIDLRLGLEVTLYISNR

SEQ ID NO: 95295 - protein, 23 aa, Pseudomonas fluorescens
  REGION 1..23: note = tr|Q4KEK3|Q4KEK3_PSEF5 Coenzyme PQQ synthesis protein A OS=Pseudomonas fluorescens (strain ATCC BAA-477 / NRRL B-23932 / Pf-5) OX=220664 GN=pqqA_2 PE=3 SV=1
MWHKPAYTDLRIGFEVTMYFANR

SEQ ID NO: 95296 - protein, 24 aa, Methylobacillus flagellatus
  REGION 1..24: note = sp|Q50436|PQQA_METFL Coenzyme PQQ synthesis protein A OS=Methylobacillus flagellatus OX=405 GN=pqqA PE=3 SV=1
MMWTKPEVTEMRFGFEVTMYVCNR

SEQ ID NO: 95297 - protein, 26 aa, Xanthomonas axonopodis
  REGION 1..26: note = tr|A0A2S6YG69|A0A2S6YG69_9XANT Pyrroloquinoline quinone peptide PqqA OS=Xanthomonas axonopodis pv. begoniae OX=473403 GN=pqqA PE=4 SV=1
MKTWKKPVVREVNCGAEINCYVSGEF

SEQ ID NO: 95298 - protein, 27 aa, Lysobacter enzymogenes
  REGION 1..27: note = tr|A0A1T3VDP8|A0A1T3VDP8_LYSEN Coenzyme PQQ peptide PqqA OS=Lysobacter enzymogenes OX=69 GN=pqqA PE=4 SV=1
MKTWSKPQIREIPCGCEINSYSSGDLF

SEQ ID NO: 95299 - protein, 26 aa, Xanthomonas campestris
  REGION 1..26: note = tr|A0A3E1LAP6|A0A3E1LAP6_XANCA Pyrroloquinoline quinone peptide PqqA OS=Xanthomonas campestris OX=339; GN = pqqA PE=4 SV=1
MKTWKKPVVREVNCGAEINCYVSGEF

SEQ ID NO: 95300 - protein, 26 aa, Xanthomonas axonopodis
  REGION 1..26: note = tr|A0A443ZCF0|A0A443ZCF0_XANMN Pyrroloquinoline quinone peptide PqqA OS=Xanthomonas axonopodis pv. manihotis str. CIO151 OX=1185660 GN=pqqA PE=4 SV=1
MKTWKKPVVREVNCGAEINCYVSGEF

SEQ ID NO: 95301 - protein, 77 aa, Lysobacter capsici
  REGION 1..77: note = tr|A0A0S2FUI7|A0A0S2FUI7_9GAMM Coenzyme PQQ peptide PqqA OS=Lysobacter capsici OX=435897 GN=pqqA PE=4 SV=1
MVSRSRRSAAMHAARRIARPAHRNVRCGRAQAVARAVNAGTAHSPPRGTLMKTWSKPQIREISVGCEINSYSSGDLF

SEQ ID NO: 95302 - protein, 24 aa, unidentified
  source 1..24: note = Rhodanobacter denitrificans
  REGION 1..24: note = tr|A0A2W5MMB4|A0A2W5MMB4_9GAMM Pyrroloquinoline quinone peptide PqqA OS=Rhodanobacter denitrificans; OX = 666685 GN=pqqA PE=4 SV=1
MTWETPQARDHRYGFEVTMYIANR

SEQ ID NO: 95303 - protein, 24 aa, Cupriavidus taiwanensis
  REGION 1..24: note = sp|B3R8D5|PQQA_CUPTR Coenzyme PQQ synthesis protein A OS=Cupriavidus taiwanensis (strain DSM 17343 / BCRC 17206 / CIP 107171 / LMG 19424 / R1) OX=977880 GN=pqqA; PE = 3SV=1
MTWTTPAYTELRLGFEITMYIANR

SEQ ID NO: 95304 - protein, 24 aa, Burkholderia cenocepacia
  REGION 1..24: note = sp|B4EHL5|PQQA_BURCJ Coenzyme PQQ synthesis protein A OS=Burkholderia cenocepacia (strain ATCC BAA-245 / DSM 16553 / LMG 16656 / NCTC 13227 / J2315 / CF5610) OX=2165 91 GN=pqqA PE=3 SV=1
MQWTTPSYTDLRFGFEITMYIANR

SEQ ID NO: 95305 - protein, 24 aa, Piscinibacter aquaticus
  REGION 1..24: note = tr|A0A5C6U5Q7|A0A5C6U5Q7_9BURK Coenzyme PQQ synthesis protein A OS=Piscinibacter aquaticus OX=392597; GN = pqqA PE=3 SV=1
MQWQTPAAADFRFGFEITMYVAAR

SEQ ID NO: 95306 - protein, 24 aa, Variovorax sp.
  REGION 1..24: note = tr|A0A1C6LYD6|A0A1C6LYD6_9BURK Coenzyme PQQ synthesis protein A OS=Variovorax sp. HW608 OX=1034889; GN = pqqA PE=3 SV=1
MHWSKPAFEDMRFGFEITMYISHR

SEQ ID NO: 95307 - protein, 24 aa, Cupriavidus sp.
  REGION 1..24: note = tr|R7XP94|R7XP94_9BURK Coenzyme PQQ synthesis protein A OS=Cupriavidus sp. GA3-3 OX=1229514 GN=pqqA PE=3; SV = 1
MRWTTPAYTELRLGFEITMYIANR

SEQ ID NO: 95308 - protein, 24 aa, unidentified
  source 1..24: note = Paraburkholderia sp.
  REGION 1..24: note = tr|A0A4Q6WY31|A0A4Q6WY31_9BURK Coenzyme PQQ synthesis protein A OS=Paraburkholderia sp. UYCP14C; OX = 2511130 GN=pqqA PE=3 SV=1
MQWTTPSYTDVRLGFEIVMYVATR

SEQ ID NO: 95309 - protein, 23 aa, Burkholderia sp.
  REGION 1..23: note = tr|A0A4V8GD81|A0A4V8GD81_9BURK Coenzyme PQQ synthesis protein A OS=Burkholderia sp. USM B20 OX=1571773; GN = pqqA PE=3 SV=1
MWTKPAYTDLRLGFEVTMYVSNR

SEQ ID NO: 95310 - protein, 24 aa, Ralstonia pickettii
  REGION 1..24: note = tr|A0A2A4AFG7|A0A2A4AFG7_RALPI Coenzyme PQQ synthesis protein A OS=Ralstonia pickettii OX=329 GN=pqqA; PE = 3 SV=1
MNWTTPAYTELRLGFEITMYIANR

SEQ ID NO: 95311 - protein, 24 aa, unidentified
  source 1..24: note = Trinickia symbiotica
  REGION 1..24: note = tr|A0A2N7X1K2|A0A2N7X1K2_9BURK Coenzyme PQQ synthesis protein A OS=Trinickia symbiotica OX=863227; GN = pqqA PE=3 SV=1
MQWTPPAYTDLRFGFEVTMYIATR

SEQ ID NO: 95312 - protein, 24 aa, unidentified
  source 1..24: note = Sutterellaceae bacterium
  REGION 1..24: note = tr|A0A2E2R1W1|A0A2E2R1W1_9BURK Coenzyme PQQ synthesis protein A OS=Sutterellaceae bacterium OX=2026794; GN = pqqA PE=3 SV=1
MQWTTPSFVDMRFGFEITMYIANR

SEQ ID NO: 95313 - protein, 24 aa, Variovorax boronicumulans
  REGION 1..24: note = tr|A0A250DUS5|A0A250DUS5_9BURK Coenzyme PQQ synthesis protein A OS=Variovorax boronicumulans OX=436515; GN = pqqA PE=3 SV=1
MKWCKPEFEEMRFGFEITMYISAR

SEQ ID NO: 95314 - protein, 102 aa, unidentified
  source 1..102: note = Caballeronia sordidicola
  REGION 1..102: note = tr|A0A158FML0|A0A158FML0_9BURK Coenzyme PQQ synthesis protein A OS=Caballeronia sordidicola OX=196367; GN = pqqA PE=3 SV=1
MGTWDTLLQNRDSQARARRGTFRRQNQPLPAAMFGTCFKQAAQPLSLRRHAVCKDVPAGTRVKASSRRFPLVNLMETTMQWTTPSYTDMRFGFEITMYIATR

SEQ ID NO: 95315 - protein, 24 aa, Massilia sp.
  REGION 1..24: note = tr|A0A3D0DV77|A0A3D0DV77_9BURK Coenzyme PQQ synthesis protein A OS=Massilia sp. OX=1882437 GN=pqqA; PE = 3 SV=1
MTWSKPEFIDWRFGFEITLYIANR

SEQ ID NO: 95316 - protein, 24 aa, Janthinobacterium sp.
  REGION 1..24: note = tr|A0A410UXT0|A0A410UXT0_9BURK Coenzyme PQQ synthesis protein A OS=Janthinobacterium sp. 17J80-10; OX = 2497863 GN=pqqA PE=3 SV=1
MQWTKPEFTDLRFGFEITMYIANR

SEQ ID NO: 95317 - protein, 24 aa, Alicycliphilus sp.
  REGION 1..24: note = tr|A0A5C8C4P3|A0A5C8C4P3_9BURK Coenzyme PQQ synthesis protein A OS=Alicycliphilus sp. OX=1872437; GN = pqqA PE=3 SV=1
MTWHTPAYCEIRLGFEVTAYVYVR

SEQ ID NO: 95318 - protein, 67 aa, Comamonas sp.
  REGION 1..67: note = tr|A0A3N1X279|A0A3N1X279_9BURK Coenzyme PQQ synthesis protein A OS=Comamonas sp. BIGb0124 OX=2485130; GN = pqqA PE=3 SV=1
MVSARDIAHPAPHNASSPCTPAGAPRCSFHSFFFPPTTQESQIMKWETPKAIDLRFGFEITMYVFNR

SEQ ID NO: 95319 - protein, 24 aa, unidentified
  source 1..24: note = Noviherbaspirillum sp.
  REGION 1..24: note = tr|A0A3A3GT30|A0A3A3GT30_9BURK Coenzyme PQQ synthesis protein A OS=Noviherbaspirillum sp. K1S02-23; OX = 2320865 GN=pqqA PE=3 SV=1
MQWTKPEFTDWRFGFEITMYIANR

SEQ ID NO: 95320 - protein, 24 aa, unidentified
  source 1..24: note = Oxalobacteraceae bacterium
  REGION 1..24: note = tr|A0A4Q3KMC8|A0A4Q3KMC8_9BURK Coenzyme PQQ synthesis protein A OS=Oxalobacteraceae bacterium; OX = 1871070 GN=pqqA PE=3 SV=1
MTWQTPQAIDVRLGFEITMYISNR

SEQ ID NO: 95321 - protein, 31 aa, unidentified
  source 1..31: note = Oxalobacteraceae bacterium
  REGION 1..31: note = tr|A0A4Q3HQ09|A0A4Q3HQ09_9BURK Coenzyme PQQ synthesis protein A OS=Oxalobacteraceae bacterium; OX = 1871070 GN=pqqA PE=3 SV=1
MKWTAPKFVEVSCGMEINRYAPADGSEPVLF
